(19) United States
(12) Patent Application Publication
(10) Pub. No.: US 2017/0321198 A1
(43) Pub. Date: Nov. 9, 2017

(54) NOVEL CRISPR ENZYMES AND SYSTEMS

(71) Applicants: THE BROAD INSTITUTE INC., Cambridge, MA (US); PRESIDENT AND FELLOWS OF HARVARD COLLEGE, Cambridge, MA (US); RUTGERS, THE STATE UNIVERSITY OF NEW JERSEY, New Brunswick, NJ (US); SKOLKOVO INSTITUTE OF SCIENCE AND TECHNOLOGY (SKOLTECH), Moscow (RU); THE UNITED STATES OF AMERICA, AS REPRESENTED BY THE SECRETARY, DEPARTMENT OF HEALTH AND HUMAN SERV, Bethesda, MD (US)

(72) Inventors: Konstantin Severinov, Piscataway, NJ (US); Feng Zhang, Cambridge, MA (US); Yuri I. Wolf, Bethesda, MD (US); Sergey Shmakov, Moscow (RU); Ekaterina Semenova, Piscataway, NJ (US); Leonid Minakhin, Piscataway, NJ (US); Kira S. Makarova, Bethesda, MD (US); Eugene Koonin, Bethesda, MD (US); Silvana Konermann, Zurich (CH); Julia Joung, Boston, MA (US); Jonathan S. Gootenberg, Cambridge, MA (US); Omar O. Abudayyeh, Boston, MA (US); Eric S. Lander, Cambridge, MA (US)

(21) Appl. No.: 15/482,603

(22) Filed: Apr. 7, 2017

Related U.S. Application Data
(63) Continuation-in-part of application No. PCT/US2016/038258, filed on Jun. 17, 2016.
(60) Provisional application No. 62/320,231, filed on Apr. 8, 2016.
(60) Provisional application No. 62/296,522, filed on Feb. 17, 2016.
(60) Provisional application No. 62/285,349, filed on Oct. 22, 2015.
(60) Provisional application No. 62/181,675, filed on Jun. 18, 2015.

(51) Int. Cl. C12N 9/22; C12N 15/82; C12N 15/11; C12N 15/85; C12N 15/10

(52) U.S. Cl. CPC C12N 9/22; C12N 15/85; C12N 15/102; C12N 15/111; C12N 15/8201

(57) ABSTRACT

The invention provides for systems, methods, and compositions for targeting nucleic acids. In particular, the invention provides non-naturally occurring or engineered RNA-targeting systems comprising a novel RNA-targeting CRISPR effector protein and at least one targeting nucleic acid component like a guide RNA.

### RELATED APPLICATIONS AND INCORPORATION BY REFERENCE

[0001] This application is a continuation-in-part of International Application PCT/US2016/038258 filed Jun. 17, 2016 and published as Publication No. WO2016/205764 on Dec. 22, 2016, and claims the benefit of U.S. Provisional Patent Application Nos, 62/320,231, filed Apr. 8, 2016, 62/181,675, filed Jun. 18, 2015, 62/285,349, filed Oct. 22, 2015, 62/296,522, filed Feb. 17, 2016.

### STATEMENT AS TO FEDERALLY SPONSORED RESEARCH

[0002] This invention was made with government support under grant numbers MH100706, MHI10049, DK097768 and GM10407 awarded by the National Institutes of Health. The government has certain rights in the invention.

[0003] All documents cited or referenced in herein cited documents, together with any manufacturer's instructions, descriptions, product specifications, and product sheets for any products mentioned herein or in any document incorporated by reference herein, are hereby incorporated herein by reference, and may be employed in the practice of the invention. More specifically, all referenced documents are incorporated by reference to the same extent as if each individual document was specifically and individually indicated to be incorporated by reference.

### SEQUENCE LISTING

[0004] The instant application contains a “lengthy” Sequence Listing which has been submitted via CD-R in lieu of a printed paper copy, and is hereby incorporated by reference in its entirety. Said CD-R, recorded on Oct. 6, 2016, is labeled “CRF” and contains one 1,155,072 bytes file (47627_99_2131_SL.txt).

### FIELD OF THE INVENTION

[0005] The present invention generally relates to systems, methods and compositions used for the control of gene expression involving sequence targeting, such as perturbation of gene transcripts or nucleic acid editing, that may use vector systems related to Clustered Regularly Interspaced. Short Palindromic Repeats (CRISPR) and components thereof.

### BACKGROUND OF THE INVENTION

[0006] Recent advances in genome sequencing techniques and analysis methods have significantly accelerated the ability to catalog and map genetic factors associated with a diverse range of biological functions and diseases. Precise genome targeting technologies are needed to enable systematic reverse engineering of causal genetic variations by allowing selective perturbation of individual genetic elements, as well as to advance synthetic biology, biotechnological, and medical applications. Although genome-editing techniques such as designer zinc fingers, transcription activator-like effectors (TALEs), or homing meganucl eases are available for producing targeted genome perturbations, there remains a need for new genome and transcriptome engineering technologies that employ novel strategies and molecular mechanisms and are affordable, easy to set up, scalable, and amenable to targeting multiple positions within the eukaryotic genome and transcriptome. This would provide a major resource for new applications in genome engineering and biotechnology.

[0007] The CRISPR-Cas systems of bacterial and archaeal adaptive immunity show extreme diversity of protein composition and genomic loci architecture. The CRISPR-Cas system loci has more than 50 gene families and there is no strictly universal genes indicating fast evolution and extreme diversity of loci architecture. So far, adopting a multi-pronged approach, there is comprehensive cas gene identification of about 395 profiles for 93 Cas proteins. Classification includes signature gene profiles plus signatures of locus architecture. A new classification of CRISPR-Cas systems is proposed in which these systems are broadly divided into two classes, Class 1 with multisubunit effector complexes and Class 2 with single-subunit effector modules exemplified by the Cas9 protein (FIGS. 1A and 1B). Novel effector proteins associated with Class 2 CRISPR-Cas systems may be developed as powerful genome engineering tools and the prediction of putative novel effector proteins and their engineering and optimization is important.

[0008] Citation or identification of any document in this application is not an admission that such document is available as prior art to the present invention.

### SUMMARY OF THE INVENTION

[0009] The CRISPR-Cas adaptive immune system defends microbes against foreign genetic elements via DNA or RNA-DNA interference. Here, we interrogate the Class 2 type VI single-component CRISPR-Cas effector C2c2 and characterize it as an RNA-guided RNase. We demonstrate that C2c2 (e.g. from Leptotrichia shahii) provides robust interference against RNA phage infection. Through in vitro biochemical analysis and in vivo assays, we show that C2c2 can be programmed to cleave ssRNA targets carrying protospacers flanked by a 3′ H (non-G) PAM. Cleavage is mediated by catalytic residues in the two conserved HEPN domains of C2c2, mutations in which generate a catalytically inactive RNA-binding protein. C2c2 is guided by a single crRNA and can be re-programmed to deplete specific mRNAs in vivo. We show that LshC2c2 can be targeted to a specific site of interest and can carry out non-specific RNase activity once primed with the cognate target RNA. These results broaden our understanding of CRISPR-Cas systems and demonstrate the possibility of harnessing C2c2 to develop a broad set of RNA-targeting tools.

[0010] There exists a pressing need for alternative and robust systems and techniques for targeting nucleic acids or polynucleotides (e.g. DNA or RNA or any hybrid or derivative thereof) with a wide array of applications. This invention addresses this need and provides related advantages. Adding the novel DNA or RNA-targeting systems of the present application to the repertoire of genomic and epigenomic targeting technologies may transform the study and perturbation or editing of specific target sites through direct detection, analysis and manipulation. To utilize the DNA or RNA-targeting systems of the present application effectively for genomic or epigenomic targeting without deleterious effects, it is critical to understand aspects of engineering and optimization of these DNA or RNA targeting tools.

[0011] The Class 2 type VI effector protein C2c2 is a RNA-guided RNase that can be efficiently programmed to degrade ssRNA. C2c2 achieves RNA cleavage through conserved basic residues within its two HEPN domains, in contrast to the catalytic mechanisms of other known RNases found in CRISPR-Cas systems. Mutation of the HEPN domain, such as (e.g. alanine) substitution, of any of the four predicted HEPN domain catalytic residues converted C2c2 into an inactive programmable RNA-binding protein (dC2c2, analogous to dCas9).

[0012] The ability of dC2c2 to bind to specified sequences could be used in several aspects according to the invention to (i) bring effector modules to specific transcripts to modulate the function or translation, which could be used for large-scale screening, construction of synthetic regulatory circuits and other purposes; (ii) fluorescently tag specific RNAs to visualize their trafficking and/or localization; (iii) alter RNA localization through domains with affinity for specific subcellular compartments; and (iv) capture specific transcripts (through direct pull down of dC2c2 or use of dC2c2 to localize biotin ligase activity to specific transcripts) to enrich for proximal molecular partners, including RNAs and proteins.

[0013] Active C2c2 should also have many applications. An aspect of the invention involves targeting a specific transcript for destruction, as with RFP here. In addition, C2c2, once primed by the cognate target, can cleave other (non-complementary) RNA molecules in vitro and can inhibit cell growth in vivo. Biologically, this promiscuous RNase activity may reflect a programmed cell death/dormancy (PCD/D)-based protection mechanism of the type VI CRISPR-Cas systems. Accordingly, in an aspect of the invention, it might be used to trigger PCD or dormancy in specific cells—for example, cancer cells expressing a particular transcript, neurons of a given class, cells infected by a specific pathogen, or other aberrant cells or cells the presence of which is otherwise undesirable.

[0014] The invention provides a method of modifying nucleic acid sequences associated with or at a target locus of interest, the method comprising delivering to said locus a non-naturally occurring or engineered composition comprising a Type VI CRISPR-Cas loci effector protein and one or more nucleic acid components, wherein the effector protein forms a complex with the one or more nucleic acid components and upon binding of the said complex to the locus of interest the effector protein induces the modification of the sequences associated with or at the target locus of interest. In a preferred embodiment, the modification is the introduction of a strand break. In a preferred embodiment, the sequences associated with or at the target locus of interest comprises RNA or DNA and the effector protein is encoded by a type VI CRISPR-Cas loci.

[0015] It will be appreciated that the terms Cas enzyme, CRISPR enzyme, CRISPR protein, Cas protein and CRISPR Cas are generally used interchangeably and at all points of reference herein refer by analogy to novel CRISPR effector proteins further described in this application, unless otherwise apparent, such as by specific reference to Cas9. The CRISPR effector proteins described herein are preferably C2c2 effector proteins.

[0016] The invention provides a method of modifying sequences associated with or at a target locus of interest, the method comprising delivering to said sequences associated with or at the locus a non-naturally occurring or engineered composition comprising a C2c2 loci effector protein and one or more nucleic acid components, wherein the C2c2 effector protein forms a complex with the one or more nucleic acid components and upon binding of the said complex to the locus of interest the effector protein induces the modification of sequences associated with or at the target locus of interest. In a preferred embodiment, the modification is the introduction of a strand break. In a preferred embodiment the C2c2 effector protein forms a complex with one nucleic acid component; advantageously an engineered or non-naturally occurring nucleic acid component. The induction of modification of sequences associated with or at the target locus of interest can be C2c2 effector protein-nucleic acid guided. In a preferred embodiment the one nucleic acid component is a CR SPR. RNA (crRNA). In a preferred embodiment the one nucleic acid component is a mature crRNA or guide RNA, wherein the mature crRNA or guide RNA comprises a spacer sequence (or guide sequence) and a direct repeat sequence or derivatives thereof. In a preferred embodiment the spacer sequence or the derivative thereof comprises a seed sequence, wherein the seed sequence is critical for recognition and/or hybridization to the sequence at the target locus. In a preferred embodiment, the sequences associated with or at the target locus of interest comprise linear or super coiled DNA.

[0017] Aspects of the invention relate to C2c2 effector protein complexes having one or more non-naturally occurring or engineered or modified or optimized nucleic acid components. In a preferred embodiment the nucleic acid component of the complex may comprise a guide sequence linked to a direct repeat sequence, wherein the direct repeat sequence comprises one or more stern loops or optimized secondary structures. In certain embodiments, the direct repeat has a minimum length of 16 nts, such as at least 28 nt, and a single stem loop. In further embodiments the direct repeat has a length longer than 16 nts, preferably more than 17 nts, such as at least 28 nt, and has more than one stern loop or optimized secondary structures. In particular embodiments, the direct repeat has 25 or more nts, such as 26 nt, 27 nt, 28 nt or more, and one or more stem loop structures. In a preferred embodiment the direct repeat may be modified to comprise one or more protein-binding RNA aptamers. In a preferred embodiment, one or more aptamers may be included such as part of optimized secondary structure. Such aptamers may be capable of binding a bacteriophage coat protein. The bacteriophage coat protein may be selected from the group comprising Qβ, F2, GA, fr, JP501, MS2, M12, R17, BZ13, JP34, JP500, KU1, M11, MX1, TW18, VK, SP, FI. ID2, NL95, TW19, AP205, φCb5, φCb8r, φCb12r, φCb23r, 7s and PRR1. In a preferred embodiment the bacteriophage coat protein is MS2. The invention also provides for the nucleic acid component of the complex being 30 or more, 40 or more or 50 or more nucleotides in length.

[0018] The invention provides methods of genome editing and transcriptome perturbation wherein the method comprises two or more rounds of C2c2 effector protein targeting and cleavage. In certain embodiments, a first round comprises the C2c2 effector protein cleaving sequences associated with a target locus far away from the seed sequence and a second round comprises the C2c2 effector protein cleaving sequences at the target locus. In certain such embodiments of the invention, a first round of targeting by a C2c2 effector protein results in a strand break and a second round of targeting by the C2c2 effector protein results in a second strand break. In an embodiment of the invention, one or more rounds of targeting by a C2c2 effector protein results in staggered cleavage that may be repaired.

[0019] The invention also provides a method of modifying a target locus of interest, the method comprising delivering to said locus a non-naturally occurring or engineered composition comprising a C2c2 loci effector protein and one or more nucleic acid components, wherein the C2c2 effector protein forms a complex with the one or more nucleic acid components and upon binding of the said complex to the locus of interest the effector protein induces the modification of the target locus of interest. In a preferred embodiment, the modification is the introduction of a strand break.

[0020] In such methods the target locus of interest may be comprised within an RNA nioledule. Also, the target locus of interest may be comprised within a DNA molecule, and in certain embodiments, within a transcribed DNA molecule. In such methods the target locus of interest may be comprised in a nucleic acid molecule in vitro.

[0021] In such methods the target locus of interest may be comprised in a nucleic acid molecule within a cell. The cell may be a prokaryotic cell or a eukaryotic cell. The cell may be a mammalian cell. The mammalian cell many be a non-human primate, bovine, porcine, rodent or mouse cell. The cell may be a non-mammalian eukaryotic cell such as poultry, fish or shrimp. The cell may also be a plant cell. The plant cell may be of a crop plant such as cassava, corn, sorghum, wheat, or rice. The plant cell may also be of an algae, tree or vegetable. The modification introduced to the cell by the present invention may be such that the cell and progeny of the cell are altered for improved production of biologic products such as an antibody, starch, alcohol or other desired cellular output. The modification introduced to the cell by the present invention may be such that the cell and progeny of the cell include an alteration that changes the biologic product produced.

[0022] The mammalian cell many be a non-human mammal, e.g., primate, bovine, ovine, porcine, canine, rodent, Leporidae such as monkey, cow, sheep, pig, dog, rabbit, rat or mouse cell. The cell may be a non-mammalian eukaryotic cell such as poultry bird (e.g., chicken), vertebrate fish (e.g., salmon) or shellfish (e.g., oyster, claim, lobster, shrimp) cell. The cell may also be a plant cell. The plant cell may be of a monocot or dicot or of a crop or grain plant such as cassava, corn, sorghum, soybean, wheat, oat or rice. The plant cell may also be of an algae, tree or production plant, fruit or vegetable (e.g., trees such as citrus trees, e.g., orange, grapefruit or lemon trees; peach or nectarine trees; apple or pear trees; nut trees such as almond or walnut or pistachio trees; nightshade plants; plants of the genus Brassica; plants of the genus Lactuca; plants of the genus Spinacia; plants of the genus Capsicum; cotton, tobacco, asparagus, carrot, cabbage, broccoli, cauliflower, tomato, eggplant, pepper, lettuce, spinach, strawberry, blueberry, raspberry, blackberry, grape, coffee, cocoa, etc).

[0023] The invention provides a method of modifying a target locus of interest, the method comprising delivering to said locus a non-naturally occurring or engineered composition comprising a Type VI CRISPR-Cas loci effector protein and one or more nucleic acid components, wherein the effector protein forms a complex with the one or more nucleic acid components and upon binding of the said complex to the locus of interest the effector protein induces the modification of the target locus of interest. In a preferred embodiment, the modification is the introduction of a strand break.

[0024] In such methods the target locus of interest may be comprised within a DNA molecule or within an RNA molecule. In a preferred embodiment, the target locus of interest comprises RNA.

[0025] The invention also provides a method of modifying a target locus of interest, the method comprising delivering to said locus a non-naturally occurring or engineered composition comprising a C2c2 loci effector protein and one or more nucleic acid components, wherein the C2c2 effector protein forms a complex with the one or more nucleic acid components and upon binding of the said complex to the locus of interest the effector protein induces the modification of the target locus of interest. In a preferred embodiment, the modification is the introduction of a strand break.

[0026] In such methods the target locus of interest may be comprised in a nucleic acid molecule in vitro. In such methods the target locus of interest may be comprised in a nucleic acid molecule within a cell. Preferably, in such methods the target locus of interest may be comprised in a RNA molecule in vitro. Also preferably, in such methods the target locus of interest may be comprised in a RNA molecule within a cell. The cell may be a prokaryotic cell or a eukaryotic cell. The cell may be a mammalian cell. The cell may be a rodent cell. The cell may be a mouse cell.

[0027] In any of the described methods the target locus of interest may be a genomic or epigenomic locus of interest. In any of the described methods the complex may be delivered with multiple guides for multiplexed use. In any of the described methods more than one protein(s) may be used,

[0028] In further aspects of the invention the nucleic acid components may comprise a putative CRISPR RNA (crRNA) sequence, Without limitation, the Applicants hypothesize that in such instances, the pre-crRNA may comprise secondary structure that is sufficient for processing to yield the mature crRNA as well as crRNA loading onto the effector protein. By means of example and not limitation, such secondary structure may comprise, consist essentially of or consist of a stem loop within the pre-crRNA, more particularly within the direct repeat.

[0029] In any of the described methods the effector protein and nucleic acid components may be provided via one or more polynucleotide molecules encoding the protein and/or nucleic acid component(s), and wherein the one or more polynucleotide molecules are operably configured to express the protein and/or the nucleic acid component(s). The one or more polynucleotide molecules may comprise one or more regulatory elements operably configured to express the protein and/or the nucleic acid component(s). The one or more polynucleotide molecules may be comprised within one or more vectors. In any of the described methods the target locus of interest may be a genomic or epigenomic locus of interest. In any of the described methods the complex may be delivered with multiple guides for multiplexed use. In any of the described methods more than one protein(s) may be used.

[0030] In any of the described methods the strand break may be a single strand break or a double strand break.

[0031] Regulatory elements may comprise inducible promotors. Polynucleotides and/or vector systems may comprise inducible systems.

[0032] In any of the described methods the one or more polynucleotide molecules may be comprised in a delivery system, or the one or more vectors may be comprised in a delivery system.

[0033] In any of the described methods the non-naturally occurring or engineered composition may be delivered via liposomes, particles including nanopartides, exosomes, microvesicles, a gene-gun or one or more viral vectors.

[0034] The invention also provides a non-naturally occurring or engineered composition which is a composition having the characteristics as discussed herein or defined in any of the herein described methods.

[0035] In certain embodiments, the invention thus provides a non-naturally occurring or engineered composition, such as particularly a composition capable of or configured to modify a target locus of interest, said composition comprising a Type VI CRISPR-Cas loci effector protein and one or more nucleic acid components, wherein the effector protein forms a complex with the one or more nucleic acid components and upon binding of the said complex to the locus of interest the effector protein induces the modification of the target locus of interest. In certain embodiments, the effector protein may be a C2c2 loci effector protein.

[0036] The invention also provides in a further aspect a non-naturally occurring or engineered composition, such as particularly a composition capable of or configured to modify a target locus of interest, said composition comprising: (a) a guide RNA molecule (or a combination of guide RNA molecules, e.g., a first guide RNA molecule and a second guide RNA molecule) or a nucleic acid encoding the guide RNA molecule (or one or more nucleic acids encoding the combination of guide RNA molecules); (b) a Type VI CRISPR-Cas loci effector protein or a nucleic acid encoding the Type VI CRISPR-Cas loci effector protein. In certain embodiments, the effector protein may be a C2c2 loci effector protein.

[0037] The invention also provides in a further aspect a non-naturally occurring or engineered composition comprising: (a) a guide RNA molecule (or a combination of guide RNA molecules, e.g., a first guide RNA molecule and a second guide RNA molecule) or a nucleic acid encoding the guide RNA molecule (or one or more nucleic acids encoding the combination of guide RNA molecules); (b) be a C2c2 loci effector protein.

[0038] The invention also provides a vector system comprising one or more vectors, the one or more vectors comprising one or more polynucleotide molecules encoding components of a non-naturally occurring or engineered composition which is a composition having the characteristics as defined in any of the herein described methods.

[0039] The invention also provides a delivery system comprising one or more vectors or one or more polynucleotide molecules, the one or more vectors or polynucleotide molecules comprising one or more polynucleotide molecules encoding components of a non-naturally occurring or engineered composition which is a composition having the characteristics discussed herein or as defined in any of the herein described methods.

[0040] The invention also provides a non-naturally occurring or engineered composition, or one or more polynucleotides encoding components of said composition, or vector or delivery systems comprising one or more polynucleotides encoding components of said composition for use in a therapeutic method of treatment. The therapeutic method of treatment may comprise gene or transcriptome editing, or gene therapy.

[0041] The invention also encompasses computational methods and algorithms to predict new Class 2 CRISPR-Cas systems and identify the components therein.

[0042] The invention also provides for methods and compositions wherein one or more amino acid residues of the effector protein may be modified e.g., an engineered or non-naturally-occurring effector protein or C2c2. In an embodiment, the modification may comprise mutation of one or more amino acid residues of the effector protein. The one or more mutations may be in one or more catalytically active domains of the effector protein. The effector protein may have reduced or abolished nuclease activity compared with an effector protein lacking said one or more mutations. The effector protein may not direct cleavage of one or other DNA or RNA strand at the target locus of interest. The effector protein may not direct cleavage of either DNA or RNA strand at the target locus of interest. In a preferred embodiment, the one or more mutations may comprise two mutations. In a preferred embodiment the one or more amino acid residues are modified in a C2c2 effector protein, e.g., an engineered or non-naturally-occurring effector protein or C2c2. In particular embodiments, the one or more modified of mutated amino acid residues are one or more of those in C2c2 corresponding to R597, H602, R1278 and H1283 (referenced to Lsh C2c2 amino acids and C2c2 consensus numbering), such as mutations R597A, H602A, R1278A and H1283A, or the corresponding amino acid residues in Lsh C2c2 orthologues.

[0043] In particular embodiments, the one or more modified of mutated amino acid residues are one or more of those in C2c2 corresponding to K2, K39, V40, E479, L514, V518, N524, G534, K535, E580, L597, V602, D630, F676, L709, 1713, R717 (HEPN), N718, H722 (HEPN), E773, P823, V828, 1879, Y880, F884, Y997, L1001, F1009, L1013, Y1093, L1099, L1111, Y1114, L1203, D1222, Y1244, L1250, L1253, K1261, I1334, L1355, L1359, R1362, Y1366, E1371, R1372, D1373, R1509 (HEPN), H1514 (HEPN), Y1543, D1544, K1546, K1548, V1551, I1558, according to C2c2 consensus numbering. In certain embodiments, the one or more modified of mutated amino acid residues are one or more of those in C2c2 corresponding to R717 and R1509. In certain embodiments, the one or more modified of mutated amino acid residues are one or more of those in C2c2 corresponding to K2, K39, K535, K1261, R1362, R1372, K1546 and K1548. In certain embodiments, said mutations result in a protein having an altered or modified activity. In certain embodiments, said mutations result in a protein having an increased activity, such as an increased specificity. In certain embodiments, said mutations result in a protein having a reduced activity, such as reduced specificity. In certain embodiments, said mutations result in a protein having no catalytic activity (i.e. “dead” C2c2). In an embodiment, said amino acid residues correspond to Lsh C2c2 amino acid residues, or the corresponding amino acid residues of a C2c2 protein from a different species.

[0044] The invention also provides for the one or more mutations or the two or more mutations to be in a catalytically active domain of the effector protein. In some embodiments of the invention the catalytically active domain may comprise a RuvCI, RuvCII or RuvCIII domain, or a catalytically active domain which is homologous to a RuvCI, RuvCII or RuvCIII domain etc or to any relevant domain as described in any of the herein described methods. In certain embodiments, the one or more mutations or the two or more mutations may be in a catalytically active domain of the effector protein comprising a HEPN domain, or a catalytically active domain which is homologous to a HEPN domain. The effector protein may comprise one or more heterologous functional domains. The one or more heterologous functional domains may comprise one or more nuclear localization signal (NLS) domains. The one or more heterologous functional domains may comprise at least two or more NLS domains. The one or more NLS domain(s) may be positioned at or near or in proximity to a terminus of the effector protein (e.g., C2c2) and if two or more NLSs, each of the two may be positioned at or near or in proximity to a terminus of the effector protein (e.g., C2c2). The one or more heterologous functional domains may comprise one or more translational activation domains. In other embodiments the functional domain may comprise a transcriptional activation domain, for example VP64. The one or more heterologous functional domains may comprise one or more transcriptional repression domains. In certain embodiments the transcriptional repression domain comprises a KRAB domain or a SID domain (e.g. SID4X). The one or more heterologous functional domains may comprise one or more nuclease domains. In a preferred embodiment a nuclease domain comprises Fok1.

[0045] The invention also provides for the one or more heterologous functional domains to have one or more of the following activities: methylase activity, demethylase activity, transcription activation activity, transcription repression activity, transcription release factor activity, histone modification activity, nuclease activity, single-strand RNA cleavage activity, double-strand RNA cleavage activity, single-strand DNA cleavage activity, double-strand DNA cleavage activity and nucleic acid binding activity. At least one or more heterologous functional domains may be at or near the amino-terminus of the effector protein and/or wherein at least one or more heterologous functional domains is at or near the carboxy-terminus of the effector protein. The one or more heterologous functional domains may be fused to the effector protein. The one or more heterologous functional domains may be tethered to the effector protein. The one or more heterologous functional domains may be linked to the effector protein by a linker moiety.

[0046] The invention also provides for the effector protein comprising an effector protein from an organism from a genus comprising Streptococcus, Campylobacter, Nitratifractor, Staphylococcus, Parvihaculum, Roseburia, Neisseria, Gluconacetohacter, Azospirillum, Sphaerochaeia, Lactobacillus, Eubacterium, Corynebacter, Carnobacterium, Rhodobacter, Listeria, Paludihacter, Clostridium, Lachnospiraceae, Clostridiaridium, Leptotrichia, Francisella, Legionella, Methanomethyophilus, Porphyromonas, Prevotella, Bacteroidetes, Hekococcus, Letospira, Desulfovibrio, Desulfonatronum, Opitutaceae, Tuberibacillus, Bacillus, Brevibacilus, Methylobacterium or Acidaminococcus. The effector protein may comprise a chimeric effector protein comprising a first fragment from a first effector protein ortholog and a second fragment from a second effector protein ortholog, and wherein the first and second effector protein orthologs are different. At least one of the first and second. effector protein orthologs may comprise an effector protein from an organism comprising Streptococcus, Campylobacter, Nitranfractor, Staphylococcus, Parvibaculum, Roseburia, Neisseria, Gluconacetobacter, Azospirillum, Sphaerochaeta, Lactobacillus, Eubacterium, Corynebacter, Carnobacterium, Rhodobacter, Listeria, Paludibacter, Clostridium, Lachnospiraceae, Clostridiaridium, Leptotrichia, Francisella, Legionella, Alicyclobacillus, Methanomethyophilus, Porphyromonas, Prevotella, Bacteroidetes, Helcococcus, Letospira, Desulfovibrio, Desulfonatronum, Opitutaceae, Luherihacillus, Bacillus, Brevibacilus, Methylobacterium or Acidaminococcus.

[0047] In certain embodiments, the effector protein, particularly a Type V loci effector protein, more particularly a Type V-B loci effector protein, even more particularly a C2c1p, may originate from, may be isolated from or may be derived from a bacterial species belonging to the taxa Bacilli, Verrucomicrobia, alpha-proteobacteria or delta-proteobacteria. In certain embodiments, the effector protein, particularly a Type V loci effector protein, more particularly a Type V-B loci effector protein, even more particularly a C2c1p, may originate from, may be isolated from or may be derived from a bacterial species belonging to a genus selected from the group consisting of Alicyclobacillus, Desulfovibrio, Desulbnatronum, Opitutaceae, Tuberibacillus, Bacillus, Brevibacillus, Desulfatirhabdium, Citrobacter, and Methlobacterium. In certain embodiments, the effector protein, particularly a Type V loci effector protein, more particularly a Type V-B loci effector protein, even more particularly a C2c1p, may originate, may be isolated or may be derived from a bacterial species selected from the group consisting of Alicyclobacillus acidoterrestris (e.g., ATCC 49025), Alicyclobacillus contaminans (e.g., DSM 17975), Desulfovihrio inopinatus (e.g., DSM 10711), Desulfonatronum thiodismutans (e.g., strain MLF-1), Opitutaceae bacterium TAV5, Tuberibacillus calidus (e.g., DSM 17572), Bacillus thermoamylovorans (e.g., strain B4166), Brevibacillus sp. CF112, Bacillus sp. NSP2.1, Desufatirhabdium butyrativorans (e.g., DSM 18734), Alicyclobacillus herbarius (e.g., DSM 13609), Citrobacter freundii (e.g., ATCC 8090), Brevibacillus agri (e.g., BAB-2500), Methylobacterium nodulans (e.g., ORS 2060). in certain embodiments, the effector protein, particularly a Type V loci effector protein, more particularly a Type V-B loci effector protein, even more particularly a C2c1p, may originate, may be isolated or may be derived from a bacterial species selected from the group consisting of the bacterial species listed in the Table in FIG. 41A-B.

[0048] In certain embodiments, the effector protein, particularly a Type V loci effector protein, more particularly a Type V-B loci effector protein, even more particularly a C2c1p, may comprise, consist essentially of or consist of an amino acid sequence selected from the group consisting of amino acid sequences shown in the multiple sequence alignment in FIG. 13D-H.

[0049] In certain embodiments, a Type V-B locus as intended herein may encode a Cas1-Cas4 fusion, Cas2, and the C2c1p effector protein. In certain embodiments, a Type V-B locus as intended herein may be adjacent to a CRISPR array. See FIG. 9 and FIG. 41A-B for illustration of representative Type V-B loci organization.

[0050] In certain embodiments, a Casl protein encoded by a Type V-B locus as intended herein may cluster with Type I-U system. See FIGS. 10A and 10B and FIG. 10C-V illustrating a Cas1 tree including Cas1 encoded by representative Type V-B loci.

[0051] In certain embodiments, the effector protein, particularly a Type V loci effector protein, more particularly a Type V-B loci effector protein, even more particularly a C2c1p, such as a native C2c1p, may be about 1100 to about 1500 amino acids long, e.g., about 1100 to about 1200 amino acids long, or about 1200 to about 1300 amino acids long, or about 1300 to about 1400 amino acids long, or about 1400 to about 1500 amino acids long, e.g., about 1100, about 1200, about 1300, about 1400 or about 1500 amino acids long.

[0052] In certain embodiments, the effector protein, particularly a Type V loci effector protein, more particularly a Type V-B loci effector protein, even more particularly a C2c1p, and preferably the C-terminal portion of said effector protein, comprises the three catalytic motifs of the RuvC-like nuclease (i.e., RuvCI, RuvCII and RuvCIII). In certain embodiments, said effector protein, and preferably the C-terminal portion of said effector protein, may further comprise a region corresponding to the bridge helix (also known as arginine-rich cluster) that in Cas9 protein is involved in crRNA-binding. In certain embodiments, said effector protein, and preferably the C-terminal portion of said effector protein, may further comprise a Zn finger region, which may be inactive (i.e., which does not bind zinc, e.g., in which the Zn-binding cysteine residue(s) are missing). In certain embodiments, said effector protein, and preferably the C-terminal portion of said effector protein, may comprise the three catalytic motifs of the RuvC-like nuclease (i.e., RuvCI, RuvCII and RuvCIII), the region corresponding to the bridge helix, and the Zn finger region, preferably in the following order, from N to C terminus: RuvCI-bridge helix-RuvCII-Zinc finger-RuvCIII. See FIG. 11, FIG. 12 and FIGS. 13A and 13C for illustration of representative Type V-B effector proteins domain architecture.

[0053] In certain embodiments, Type V-B loci as intended herein may comprise CRISPR repeats between 30 and 40 bp long, more typically between 34 and 38 bp long, even more typically between 36 and 37 bp long, e.g., 30, 31, 32, 33, 34, 35, 36, 37, 38, 39, or 40 bp long.

[0054] In certain embodiments, the effector protein, particularly a Type V loci effector protein, more particularly a Type V-C loci effector protein, even more particularly a C2c3p, may originate, may be isolated or may be derived from a bacterial metagenome selected from the group consisting of the bacterial metagenomes listed in the Table in FIG. 43A-B.

[0055] In certain embodiments, the effector protein, particularly a Type V loci effector protein, more particularly a Type V-C loci effector protein, even more particularly a C2c3p, may comprise, consist essentially of or consist of an amino acid sequence selected from the group consisting of amino acid sequences shown in the multiple sequence alignment in FIG. 13I,

[0056] In certain embodiments, a Type V-C locus as intended herein may encode Cas1 and the C2c3p effector protein. See FIG. 14 and FIG. 43A-B for illustration of representative Type V-C loci organization.

[0057] In certain embodiments, a Cas1 protein encoded by a Type V-C locus as intended herein may cluster with Type 1-B system. See FIG. 10A and 10B and FIG. 10C-W illustrating a Cas1 tree including Cas1 encoded by representative Type V-C loci.

[0058] In certain embodiments, the effector protein, particularly a Type V loci effector protein, more particularly a Type V-C loci effector protein, even more particularly a C2c3p, such as a native C2c3p, may be about 1100 to about 1500 amino acids long, e.g., about 1100 to about 1200 amino acids long, or about 1.200 to about 1300 amino acids long, or about 1300 to about 1400 amino acids long, or about 1400 to about 1500 amino acids long, e.g., about 1100, about 1200, about 1300, about 1400 or about 1500 amino acids long, or at least about 1100, at least about 1200, at least about 1300, at least about 1400 or at least about 1500 amino acids long.

[0059] In certain embodiments, the effector protein, particularly a Type V loci effector protein, more particularly a Type V-C loci effector protein, even more particularly a C2c3p, and preferably the C-tenninal portion of said effector protein, comprises the three catalytic motifs of the RuvC-like nuclease (i.e., RuvCI, RuvCII and RuvCIII). In certain embodiments, said effector protein, and preferably the C-terminal portion of said effector protein, may further comprise a region corresponding to the bridge helix (also known as arginine-rich cluster) that in Cas9 protein is involved in crRNA-binding. In certain embodiments, said effector protein, and preferably the C-terminal portion of said effector protein, may further comprise a Zn finger region. Preferably, the Zn-binding cysteine residue(s) may be conserved in C2c3p. In certain embodiments, said effector protein, and preferably the C-terminal portion of said effector protein, may comprise the three catalytic motifs of the RuvC-like nuclease (i.e., RuvCI, RuvCII and RuvCIII), the region corresponding to the bridge helix, and the Zn finger region, preferably in the following order, from N to C terminus: RuvCI-bridge helix-RuvCII-Zinc finger-RuvCIII. See FIGS. 13A and 13C for illustration of representative Type V-C effector proteins domain architecture. In particular embodiments, said effector protein may comprise two HEPN catalytic motifs as illustrated in FIG. 97(A).

[0060] In certain embodiments, Type V-C loci as intended herein may comprise CRISPR repeats between 20 and 30 bp long, more typically between 22 and 27 bp long, yet more typically 25 bp long, e.g., 20, 21, 22, 23, 24, 25, 26, 27, 28, 29, or 30 bp long.

[0061] In certain embodiments, the effector protein, particularly a Type VI loci effector protein, more particularly a C2c2p, may originate from, may be isolated from, or may be derived from a bacterial species belonging to the taxa alpha-proteobacteria, Bacilli, Clostridia, usobacteria and Bacteroidetes. In certain embodiments, the effector protein, particularly a Type VI loci effector protein, more particularly a C2c2p, may originate from, may be isolated from, or may be derived from a bacterial species belonging to a genus selected from the group consisting of Lachnospiraceae, Clostridium, Carnobacterium, Paludibacter, Listeria, Leptotrichia, and Rhodohacter. In certain embodiments, the effector protein, particularly a Type VI loci effector protein, more particularly a C2c2p may originate from, may be isolated from or may be derived from a bacterial species selected from the group consisting of Lachnospiraceae bacterium MA2020, Lachnospiraceae bacterium NK4A179, Clostridium aininophilum (e.g., DSM 10710), Lachnospiraceae bacterium NK4A144, Carnobacterium gallinarum (e.g., DSM 4847 strain MT44), Paludibacter propionicigenes (e.g., WB4), Listeria seeligeri (e.g., serovar ½b str. SLCC3954), Listeria weihenstephanensis (e.g., FSL R9-0317 c4), Listeria newyorkensis (e.g., strain FSL M6-0635), Leptotrichia wadei (e.g., F0279), Leptotrichia buccalis (e.g., DSM 1135), Leptotrichia sp. Oral taxon 225 (e.g., str. F0581), Leptotrichia sp. Oral taxon 879 (e.g., strain F0557), Leptotrichia shahii (e.g., DSM 19757), Rhodobacter capsulatus (e.g., SB 1003, R121, or DE442). In certain embodiments, the effector protein, particularly a Type VI loci effector protein, more particularly a C2c2p may originate from, may be isolated from or may be derived from a bacterial species selected from the group consisting of the bacterial species listed in the Table in FIG. 42A-B. In particular embodiments, the C2c2 protein originates from Leptotrichia shahii (e.g., DSM 19757).

[0062] In certain embodiments, the effector protein, particularly a Type VI loci effector protein, more particularly a C2c2p, may comprise, consist essentially of or consist of an amino acid sequence selected from the group consisting of amino acid sequences shown in the multiple sequence alignment in FIG. 13J-N or more particularly from the group consisting of amino acid sequences shown in the sequence alignment in FIG. 110.

[0063] In certain embodiments, a Type VI locus as intended herein may encode Cas1, Cas2, and the C2c2p effector protein. In certain embodiments, a Type V-C locus as intended herein may comprise a CRISPR array. In certain embodiments, a Type V-C locus as intended herein may comprise the c2c2 gene and a CRISPR array, and not comprise casi and cast genes. See FIG. 15 and FIG. 42A-B for illustration of representative Type VI loci organization.

[0064] In certain embodiments, a Cas1 protein encoded by a Type VI locus as intended herein may cluster within the Type II subtree along with a small Type III-A branch, or within Type III-A system. See FIGS. 10A and 10B and FIG. 10C-W illustrating a Cas1 tree including Cas1 encoded by representative Type VI loci.

[0065] In certain embodiments, the effector protein, particularly a Type VI loci effector protein, more particularly a C2c2p, such as a native C2c2p, may be about 1000 to about 1500 amino acids long, such as about 1100 to about 1400 amino acids long, e.g., about 1000 to about 1100, about 1100 to about 1200 amino acids long, or about 1200 to about 1300 amino acids long, or about 1300 to about 1400 amino acids long, or about 1400 to about 1500 amino acids long, e.g., about 1000, about 1100, about 1200, about 1300, about 1400 or about 1500 amino acids long.

[0066] In certain embodiments, the effector protein, particularly a Type VI loci effector protein, more particularly a C2c2p, comprises at least one and preferably at least two, such as more preferably exactly two, conserved RxxxxH motifs. Catalytic RxxxxH motifs are are characteristic of HEPN (Higher Eukaryotes and Prokaryotes Nucleotide-binding) domains. Hence, in certain embodiments, the effector protein, particularly a Type VI loci effector protein, more particularly a C2c2p, comprises at least one and preferably at least two, such as more preferably exactly two, HEPN domains. See FIG. 11 and. FIG. 13B and. FIG. 110A for illustration of representative'Type VI effector proteins domain architecture. in certain embodiments, the HEPN domains may possess RNAse activity. In other embodiments, the HEPN domains may possess DNAse activity.

[0067] In certain embodiments, Type VI loci as intended herein may comprise CRISPR repeats between 30 and 40 bp long, more typically between 35 and 39 bp long, e.g., 30, 31, 32, 33, 34, 35, 36, 37, 38, 39, or 40 bp long. In particular embodiments, the direct repeat is at least 25 nt long.

[0068] In certain embodiments, a protospacer adjacent motif (PAM) or PAM-like motif directs binding of the effector protein complex as disclosed herein to the target locus of interest. In some embodiments, the PAM may be a 5′ PAM (i.e., located upstream of the 5′ end of the protospacer). In other embodiments, the PAM may be a 3′ PAM (i.e., located downstream of the 5′ end of the protospacer). The term “PAM” may be used interchangeably with the term “PFS” or “protospacer flanking site” or “protospacer flanking sequence”.

[0069] In a preferred embodiment, the effector protein, particularly a Type V loci effector protein, more particularly a Type V-B loci effector protein, even more particularly a C2c1p, may recognize a 5′ PAM. In certain embodiments, the effector protein, particularly a Type V loci effector protein, more particularly a Type V-B loci effector protein, even more particularly a C2c1p, may recognize a 5′ PAM which is 5′ TTN or 5′ ATTN, where N is A, C, G or T. In certain preferred embodiments, the effector protein may be Alicyclobacillus acidoterrestris C2c1p, more preferably Alicyclobacillus acidoterrestris ATCC 49025 C2c1p, and the 5′ PAM is 5′ ITN, where N is A, C, or T, more preferably where N is A, G or T. In other preferred embodiments, the effector protein is Bacillus thermownylovorans C2c1p, more preferably Bacillus thermoamylovorans strain 134166 C2c1p, and the 5′ PAM is 5′ ATTN, where N is A, C, G or T.

[0070] In a preferred embodiment, the effector protein, particularly a Type VI loci effector protein, more particularly a C2c2p, may recognize a 3′ PAM. In certain embodiments, the effector protein, particularly a Type VI loci effector protein, more particularly a C2c2p, may recognize a 3′ PAM which is 5′H, wherein H is A, C or U. In certain preferred embodiments, the effector protein may be Leptotrichia shahii C2c2p, more preferably Leptotrichia shahii DSM 19757 C2c2, and the 5′ PAM is a 5′ H.

[0071] In certain embodiments, the CRISPR enzyme is engineered and can comprise one or more mutations that reduce or eliminate a nuclease activity. Mutations can also be made at neighboring residues, e.g., at amino acids near those indicated above that participate in the nuclease activity. In some embodiments, only one HEPN domain is inactivated, and in other embodiments, a second HEPN domain is inactivated.

[0072] In certain embodiments of the invention, the guide RNA or mature crRNA comprises, consists essentially of, or consists of a direct repeat sequence and a guide sequence or spacer sequence. In certain embodiments, the guide RNA or mature crRNA comprises, consists essentially of, or consists of a direct repeat sequence linked to a guide sequence or spacer sequence. In certain embodiments the guide RNA or mature crRNA comprises 19 nts of partial direct repeat followed by 18, 19, 20, 21, 22, 23, 24, 25, or more nt of guide sequence, such as 18-25, 19-25, 20-25, 21-25, 22-25, or 23-25 nt of guide sequence or spacer sequence. In certain embodiments, the effector protein is a C2c2 effector protein and requires at least 16 nt of guide sequence to achieve detectable DNA cleavage and a minimum of 17 nt of guide sequence to achieve efficient DNA cleavage in vitro. In particular embodiments, the effector protein is a C2c2 protein and requires at least 19 nt of guide sequence to achieve detectable RNA cleavage. In certain embodiments, the direct repeat sequence is located upstream (i.e., 5′) from the guide sequence or spacer sequence. In a preferred embodiment the seed sequence (i.e. the sequence essential critical for recognition and/or hybridization to the sequence at the target locus) of the C2c2 guide RNA is approximately within the first 5 nt on the 5′ end of the guide sequence or spacer sequence.

[0073] In preferred embodiments of the invention, the mature crRNA comprises a stem loop or an optimized stem loop structure or an optimized secondary structure. In preferred embodiments the mature crRNA comprises a stem loop or an optimized stem loop structure in the direct repeat sequence, wherein the stem loop or optimized stem loop structure is important for cleavage activity. In certain embodiments, the mature crRNA preferably comprises a single stem loop. In certain embodiments, the direct repeat sequence preferably comprises a single stem loop. In certain embodiments, the cleavage activity of the effector protein complex is modified by introducing mutations that affect the stem loop RNA duplex structure. In preferred embodiments, mutations which maintain the RNA duplex of the stem loop may be introduced, whereby the cleavage activity of the effector protein complex is maintained. In other preferred embodiments, mutations which disrupt the RNA duplex structure of the stem loop may be introduced, whereby the cleavage activity of the effector protein complex is completely abolished.

[0074] In particular embodiments, the C2c2 protein is a.n Lsh C2c2 effector protein and the mature crRNA comprises a stem loop or an optimized stem loop structure. In particular embodiments, the direct repeat of the crRNA comprises at least 25 nucleotides comprising a stem loop. In particular embodiments, the the stem is amenable to individual base swaps but activity is disrupted by most secondary structure changes or truncation of the crRNA. Examples of disrupting mutations include swapping of more than two of the stem nucleotides, addition of a non-pairing nucleotide in the stem, shortening of the stem (by removal of one of the pairing nucleotides) or extending the stem (by addition of one set of pairing nucleotides). However, the crRNA may be amenable to 5′ and/or 3′ extensions to include non-functional RNA sequences as envisaged for particular applications described herein.

[0075] The invention also provides for the nucleotide sequence encoding the effector protein being codon optimized for expression in a eukaryote or eukaryotic cell in any of the herein described methods or compositions. In an embodiment of the invention, the codon optimized nucleotide sequence encoding the effector protein encodes any C2c2 discussed herein and is codon optimized for operability in a eukaryotic cell or organism, e.g., such cell or organism as elsewhere herein mentioned, for instance, without limitation, a yeast cell, or a mammalian cell or organism, including a mouse cell, a rat cell, and a human cell or non-human eukaryote organism, e.g., plant,

[0076] In certain embodiments of the invention, at least one nuclear localization signal (NLS) is attached to the nucleic acid sequences encoding the C2c2 effector proteins. In preferred embodiments at least one or more C-terminal or N-terminal NLSs are attached (and hence nucleic acid molecule(s) coding for the C2c2 effector protein can include coding for NLS(s) so that the expressed product has the NLS(s) attached or connected). In certain embodiments of the invention, at least one nuclear export signal (NES) is attached to the nucleic acid sequences encoding the C2c2 effector proteins. In preferred embodiments at least one or more C-terminal or N-terminal NESs are attached (and hence nucleic acid molecule(s) coding for the C2c2 effector protein can include coding for NES(s) so that the expressed product has the NES(s) attached or connected). In a preferred embodiment a C-terminal and/or N-terminal NLS or NES is attached for optimal expression and nuclear targeting in eukaryotic cells, preferably human cells. In a preferred embodiment, the codon optimized effector protein is C2c2 and the spacer length of the guide RNA is from 15 to 35 nt. In certain embodiments, the spacer length of the guide RNA is at least 16 nucleotides, such as at least 17 nucleotides, preferably at least 18 nt, such as preferably at least 19 nt, at least 20 nt, at least 21 nt, or at least 22 nt. In certain embodiments, the spacer length is from 15 to 17 nt, from 17 to 20 nt, from 20 to 24 nt, eg. 20, 21, 22, 23, or 24 nt, from 23 to 25 nt, e.g., 23, 24, or 25 nt, from 24 to 27 nt, from 27-30 nt, from 30-35 nt, or 35 nt or longer. In certain embodiments of the invention, the codon optimized effector protein is C2c2 and the direct repeat length of the guide RNA is at least 16 nucleotides. In certain embodiments, the codon optimized effector protein is C2c2 and the direct repeat length of the guide RNA is from 16 to 20 nt, e.g., 16, 17, 18, 19, or 20 nucleotides. In certain preferred embodiments, the direct repeat length of the guide RNA is 19 nucleotides.

[0077] The invention also encompasses methods for delivering multiple nucleic acid components, wherein each nucleic acid component is specific for a different target locus of interest thereby modifying multiple target loci of interest. The nucleic acid component of the complex may comprise one or more protein-binding RNA aptamers. The one or more aptamers may be capable of binding a bacteriophage coat protein. The bacteriophage coat protein may be selected from the group comprising Qβ, F2, GA, fr, JP501, MS2, M12, R17, BZ13, JP34, JP500, KU1, M11, MX1, TWI8, VK, SP, FI, ID2, NL95, TWI9, AP205, φCb5, φCb8r, φCb12r, φCb23r, 7s and PRR1 a preferred embodiment the bacteriophage coat protein is MS2. The invention also provides for the nucleic acid component of the complex being 30 or more, 40 or more or 50 or more nucleotides in length.

[0078] Accordingly, it is an object of the invention not to encompass within the invention any previously known product, process of making the product, or method of using the product such that Applicants reserve the right and hereby disclose a disclaimer of any previously known product, process, or method. It is further noted that the invention does not intend to encompass within the scope of the invention any product, process, or making of the product or method of using the product, which does not meet the written description and enablement requirements of the USPTO (35 U.S.C. §112, first paragraph) or the EPO (Article 83 of the EPC), such that Applicants reserve the right and hereby disclose a disclaimer of any previously described product, process of making the product, or method of using the product. It may be advantageous in the practice of the invention to be in compliance with Art. 53(c) EPC and Rule 28(b) and (c) EPC, Nothing herein is to be construed as a promise,

[0079] It is noted that in this disclosure and particularly in the claims and/or paragraphs, terms such as “comprises”, “comprised”, “comprising” and the like can have the meaning attributed to it in U.S. Patent law; e.g., they can mean “includes”, “included”, “including”, and the like; and that terms such as “consisting essentially of” and “consists essentially of” have the meaning ascribed to them in U.S. Patent law, e.g., they allow for elements not explicitly recited, but exclude elements that are found in the prior art or that affect a basic or novel characteristic of the invention.

[0080] In a further aspect, the invention provides a eukaryotic cell comprising a nucleotide sequence encoding the CRISPR system described herein which ensures the generation of a modified target locus of interest, wherein the target locus of interest is modified according to in any of the herein described methods. A further aspect provides a cell line of said cell. Another aspect provides a multicellular organism comprising one or more said cells.

[0081] In certain embodiments, the modification of the target locus of interest may result in: the eukaryotic cell comprising altered expression of at least one gene product; the eukaryotic cell comprising altered expression of at least one gene product, wherein the expression of the at least one gene product is increased; the eukaryotic cell comprising altered expression of at least one gene product, wherein the expression of the at least one gene product is decreased; or the eukaryotic cell comprising an edited genome.

[0082] In certain embodiments, the eukaryotic cell may be a mammalian cell or a human cell.

[0083] In further embodiments, the non-naturally occurring or engineered compositions, the vector systems, or the delivery systems as described in the present specification may be used for RNA sequence-specific interference, RNA sequence specific modulation of expression (inluding isoform specific expression), stability, localization, functionality (e.g. ribosomal RNAs or miRNAs), etc; or multiplexing of such processes.

[0084] In further embodiments, the the non-naturally occurring or engineered compositions, the vector systems, or the delivery systems as described in the present specification may be used for RNA detection and/or quantification within a cell.

[0085] In further embodiments, the the non-naturally occurring or engineered compositions, the vector systems, or the delivery systems as described in the present specification may be used for generating disease models and/or screening systems.

[0086] In further embodiments, the non-naturally occurring or engineered compositions, the vector systems, or the delivery systems as described in the present specification may be used for: site-specific transcriptome editing or perturbation; nucleic acid sequence-specific interference; or multiplexed genome engineering.

[0087] Also provided is a gene product from the cell, the cell line, or the organism as described herein. In certain embodiments, the amount of gene product expressed may be greater than or less than the amount of gene product from a cell that does not have altered expression or edited genome. In certain embodiments, the gene product may be altered in comparison with the gene product from a cell that does not have altered expression or edited genome.

[0088] These and other embodiments are disclosed or are obvious from and encompassed by, the following Detailed Description.

### BRIEF DESCRIPTION OF THE DRAWINGS

[0089] The novel features of the invention are set forth with particularity in the appended claims. A better understanding of the features and advantages of the present invention will be obtained by reference to the following detailed description that sets forth illustrative embodiments, in which the principles of the invention are utilized, and the accompanying drawings of which:

[0090] FIGS. 1A-1B depicts a new classification of CRISPR-Cas systems. Class I includes multisubunit crRNA-effector complexes (Cascade) and Class 2 includes Single-subunit crRNA-effector complexes (Cas9-like). FIG. 1B provides another depiction of the new classification of CRISPR-Cas systems.

[0091] FIG. 2. provides a molecular organization of CRISPR-Cas.

[0092] FIGS. 3A-3D provides structures of Type I and III effector complexes: common architecture/common ancestry despite extensive sequence divergence.

[0093] FIG. 4 shows CRISPR-Cas as a RNA recognition motif (RRJVI)-centered system.

[0094] FIG. 5 shows a Casl phylogeny where recombination of adaptation and crRNA-effector modules show a major aspect of CRISPR-Cas evolution.

[0095] FIG. 6 shows a CRISPR-Cas census, specifically a distribution of CRISPR-Cas types/subtypes among archaea and bacteria.

[0096] FIG. 7 depicts a pipeline for identifying Cas candidates.

[0097] FIGS. 8A-8B depicts an organization of complete loci of Class 2 CRISPR-Cas systems. The three subtypes of type II and subtypes V-A, V-B and V-C, and type VI are indicated. Subfamilies based on Cast are also indicated. The schematics include only the common genes represented in each subtype; the additional genes present in some variants are omitted. The red rectangle shows the degenerate repeat. The gray arrows show the direction of CRISPR array transcription. PreFran, Prevotella-Francisella. FIG. 8B provides another depiction of an organization of complete loci of several Class 2 CRISPR-Cas systems.

[0098] FIG. 9 depicts C2c1 neighborhoods, i.e., genomic architecture of the C2c1 CRISPR-Cas loci. The number of repeats in CRISPR arrays is indicated. For each genomic contig, Genbank numeric ID and the coordinates of the locus are indicated.

[0099] FIGS. 10A-10B, FIGS. 10A and 10B depict representations of a Cas1 tree. The tree in FIG. 10B was constructed from a multiple alignment of 1498 Cas1 sequences which contained 304 phylogenetically informative positions. Branches, corresponding to Class 2 systems are highlighted: cyan, type II; orange, subtype V-A; red, subtype V-B; brown, subtype V-C; purple, type VI. Insets show the expanded branches of the novel (sub)types. The bootstrap support values are given as percentage points and shown only for few relevant branches.

[0100] FIGS. 10C1-10W. FIGS. 10C-10W provide the complete Cast tree, which is schematically shown in FIG. 10B, in Newick format with species names and bootstrap support values. The tree was reconstructed by FastTree program (“-gamma -wag” options). A multiple alignment of Cast sequences was filtered with homogeneity threshold of 0.1 and gap occurrence threshold of 0.5, prior to tree reconstruction.

[0101] FIG. 11 depicts a domain organization of class 2 families.

[0102] FIGS. 12-1 to 12-2 depicts TnpB homology regions in Class 2 proteins. Figure discloses SEQ ID NOS 202-384, respectively, in order of appearance.

[0103] FIGS. 13A-1 to 13N-4. FIGS. 13A and 13B provide another depiction of domain architectures and conserved motifs of the Class 2 effector proteins. FIG. 13A illustrates Types II and V: TnpB-derived nucleases. The top panel shows the RuvC nuclease from Thermos thermophiles (PDB 4EP5) with the catalytic amino acid residues denoted. Underneath each domain architecture, an alignment of the conserved motifs in selected representatives of the respective protein family (a single sequence for RuvC) is shown. The catalytic residues are shown by white letters on a black background; conserved hydrophobic residues are highlighted in yellow; conserved small residues are highlighted in green; in the bridge helix alignment, positively charged residues are in red. Secondary structure prediction is shown underneath the aligned sequences: H denotes a-helix and E denotes extended conformation (β-strand). The poorly conserved spacers between the alignment blocks are shown by numbers. FIG. 13B illustrates Type VI: proteins containing two HEPN domains, which may display RNA.se activity. The top alignment blocks include selected HEPN domains described previously and the bottom blocks include the catalytic motifs from the type VI effector proteins. The designations are as in FIG. 13A. FIG. 13C shows the closest homologs of the new type V effector proteins among the transposon-encoded proteins: non-overlapping sets of homologs. FIG. 13D-H shows multiple alignment of C2c1 protein family. The alignment was built using MUSCLE program and modified manually on the basis of local PSI-BLAST pairwise alignments. Each sequence is labelled with GenBank Identifier (GI) number and systematic name of an organism. Secondary structure was predicted by Jpred and shown underneath the sequence which was used as a query (designations: H—alpha helix, E—beta strand). CONSENSUS was calculated for each alignment column by scaling the sum-of-pairs score within the column between those of a homogeneous column (the same residue in all aligned sequences) and a random column with homogeneity cutoff 0.8. Active site motifs of RuvC-like domain are shown below alignment. FIG. 13I shows multiple alignment of C2c3 protein family. The alignment was built using MUSCLE program. Each sequence is labelled with local assigned number and the Genbank ID for metagenomics contig coding for respective C2c3 protein. Secondary structure was predicted by Jpred and shown underneath the alignment (designations: H—alpha helix, E—beta strand). CONSENSUS was calculated for each alignment column by scaling the sum-of-pairs score within the column between those of a homogeneous column (the same residue in all aligned sequences) and a random column with homogeneity cutoff 0.8. Active site motifs of RuvC-like domain are shown below alignment for the C-terminal domain. FIG. 13J-N shows multiple alignment of C2c2 protein family. The alignment was built using MUSCLE program and modified manually on the basis of local PSIBLAST pairwise alignments. Each sequence is labelled with GenBank Identifier (GI) number and systematic name of an organism. Secondary structure was predicted by Jpred and shown underneath the sequence which was used as a query (designations: H—alpha helix, E—beta strand). CONSENSUS was calculated for each alignment column by scaling the sum-of-pairs score within the column between those of a homogeneous column (the same residue in all aligned sequences) and a random column with homogeneity cutoff 0.8. Active site motifs of HEPN domain are shown below alignment. FIG. 13A discloses SEQ ID NOS 385-503, respectively, in order of appearance. FIG. 13B discloses SEQ ID NOS 504-547, respectively, in order of appearance. FIGS. 13D-H disclose SEQ II) NOS 548-567, respectively, in order of appearance. FIG. 131 discloses SEQ ID NOS 568, 569 & 1786, and 570-572, respectively, in order of appearance. FIGS. 13J-N disclose SEQ ID NOS 573-591, respectively, in order of appearance.

[0104] FIG. 14 depicts C2c3 neighborhoods, i.e., genomic architecture of the C2c3 CRISPR-Cas loci. The number of repeats in CR1SPR arrays is indicated. For each genomic contig, Genbank numeric ID and the coordinates of the locus are indicated.

[0105] FIG. 15 depicts C2c2 neighborhoods.

[0106] FIGS. 16-1 to 16-8 depicts HEPN RxxxxH motif in C2c2 family. Figure discloses SEQ ID NOS 592-1195, respectively, in order of appearance.

[0107] FIG. 17 depicts C2C1: 1. Alicyclobacillus acidoterrestris ATCC 4902.5 Figure discloses SEQ ID NOS 1196-1199, respectively, in order of appearance.

[0108] FIG. 18 depicts C2C1: 4. Desulfonatronum thiodismutans strain MLF-1 Figure discloses SEQ ID NOS 1200-1203, respectively, in order of appearance.

[0109] FIG. 19 depicts C2C1: 5. Opitutaceae bacterium TAV5 Figure discloses SEQ ID NOS 1204-1207, respectively, in order of appearance.

[0110] FIG. 20 depicts C2C1: 7. Bacillus thermoamylovorans strain 134166 Figure discloses SEQ ID NOS 1208-1211, respectively, in order of appearance.

[0111] FIG. 21 depicts C2C1: 9. Bacillus sp. NSP2.1. Figure discloses SEQ ID NOS 1215, respectively, in order of appearance.

[0112] FIG. 22 depicts C2C2: 1. Lachnospiraceae bacterium MA2020 Figure discloses SEQ ID NOS 1216-1219, respectively, in order of appearance.

[0113] FIGS. 23-1 to 23-2 depicts C2C2: 2. Lachnospiraceae bacterium NK4A179 Figure discloses SEQ ID NOS 1220-1226, respectively, in order of appearance.

[0114] FIG. 24 depicts C2C2: 3. [Clostridium] aminophilum DSM 10710 Figure discloses SEQ ID NOS 1227-1230, respectively, in order of appearance.

[0115] FIG. 25 depicts C2C2: 4. Lachnospiraceae bacterium NK4A144 Figure discloses SEQ ID NOS 1231-1232, respectively, in order of appearance.

[0116] FIG. 26 depicts C2C2: 5. Carnobacterium gallinarum DSM 4847 Figure discloses SEQ ID NOS 1233-1236, respectively, in order of appearance.

[0117] FIGS. 27-1 to 27-2 depicts C2C2: 6. Carnobacterium gallinarum DSM 4847 Figure discloses SEQ ID NOS 1237-1243, respectively, in order of appearance.

[0118] FIG. 28 depicts C2C2: 7. Paludibacter propionicigenes WB4 Figure discloses SEQ ID NO: 1244.

[0119] FIG. 29 depicts C2C2: 8. Listetia seeligeri serovar 1/2b Figure discloses SEQ ID NOS 1245-1248, respectively, in order of appearance.

[0120] FIG. 30 depicts C2C2: 9. Listeria weihenstephanensis FSL R9-0317 Figure discloses SEQ ID NO: 1249.

[0121] FIGS. 31-1 to 31-2 depicts C2C2: 10. Listeria bacterium FSL M6-0635 Figure discloses SEQ II) NOS 1250-1253, respectively, in order of appearance.

[0122] FIG. 32 depicts C2C2: 11. Leptotrichia wadei F0279 Figure discloses SEQ_{.} ID NO: 1254.

[0123] FIGS. 33-1 to 33-2 depicts C2C2: 12. Leptotrichia wadei F0279 Figure discloses SEQ ID NOS 1255-1261, respectively, in order of appearance.

[0124] FIG. 34 depicts C2C2: 14. Leptotrichia shahii DSM 19757 Figure discloses SEQ ID NOS 1262-1265, respectively, in order of appearance.

[0125] FIG. 35 depicts C2C2: 15, Rhodobacter capsulatus SB 1003 Figure discloses SEQ ID NOS 1266-1267, respectively, in order of appearance.

[0126] FIG. 36 depicts C2C2: 16. Rhodobacter capsulatus R121 Figure discloses SEQ ID NOS 1268-1269, respectively, in order of appearance.

[0127] FIG. 37 depicts C2C2: 17. Rhodobacter capsulatus DE442 Figure discloses SEQ ID NOS 1270-1271, respectively, in order of appearance.

[0128] FIG. 38 depicts a tree of DRs

[0129] FIG. 39 depicts a tree of C2c2s

[0130] FIGS. 40A-40D shows the Table listing 63 large protein-coding genes identified using the computational pipeline disclosed herein in the vicinity of cas1 genes, Representatives of the new subtypes disclosed herein (V-B, V-C, VI) are colored. Protein sequences for AUXO014641567.1, AUXO011689375.1, AUXO011.689375.1, AUXO011277409.1, AUXO01498661.5,1 coding representatives of Type V-B and Type IV were not analyzed, since species affiliation cannot be assigned to these sequences.

[0131] FIGS. 41A-41M-2. FIGS. 41A-B shows the Table presenting the analysis of Type V-B (C2c1 protein-encoding) loci.*caslcas4—gene containing cas4 and cast domains; CRISPR—CRISPR. repeat; SOS—SOS response gene; unk—hypothetical protein;>—direction of gene coding sequence; [D]—degenerate repeat (defined where it was possible); [T]—tracrRNA, FIG. 41C-J shows CRISPR. arrays analysis of Type V-B (C2c1 protein-encoding) loci as disclosed herein (CRISPR section is basic output of pilercr (see pilercr site for description of output: www.drive5.com/pilerer/); repeat folding was done with mfold (see mfold site for description of output: mfold.rna.albany.edu/?q=mfold/DNA-Folding-Form); repeat folding and CRISPRS array are placed after detailed description of each case; for CRISPR location see link in the Table in FIG. 41A-B). FIG. 41K shows CRISPRmap classification of CRISPR repeats of Type V-B (C2c1 protein-encoding) loci as disclosed herein using CRISPRmap (see rna.informatik.uni-freiburg.de/CRISPRmap/Input.jsp for details). FIG. 41L shows degenerate repeats of Type V-B (C2c1 protein-encoding) loci as disclosed herein found using CRISPRs finder (crispr.u-psud.fr/Server/). Normal repeat column contains normal repeat, spacer—the last spacer, downstream—downstream region starting from degenerate repeat (250 bp); array number corresponds to the number of CRISPR array in the respective locus (see the Table in FIG. 41A-B); region highlighted in yellow has a perfect match between normal repeat and degenerate repeat (other part of degenerate repeat does not match). FIG. 41M shows predicted structures of tracrRNAs base-paired with the repeats. TracrRNA for Alicyclobacillus acidoterrestric was identifed using RNAseq. For the remaining loci, putative tracrRNAs were identifed based on presence of an anti-direct repeat (DR) sequence. Anti-DRs were identifed using Geneious (www.geneious.com) by searching for sequences within each respective CRISPR locus that are highly homologus to DR. The 5′ and 3′ ends of each putative tracrRNA was determined though computational prediction of bacterial transcription start and termination sites using BPROM (www.softberry.com) and ARNOLD (rna.ig-mors.u-psud.fr/toolbox/arnold/) respectively. Co-folding redictions were generated using Geneious. 5′ ends are colored blue and 3′ ends are colored orange. FIG. 41C discloses SEQ ID NOS 1272-1311, respectively, in order of appearance. FIG. 41D discloses SEQ ID NOS 1312-1319, respectively, in order of appearance. FIG. 41E discloses SEQ ID NOS 1320-1326, respectively, in order of appearance. FIG. 41F discloses SEQ ID NOS 1327-1367, respectively, in order of appearance. FIG. 41G discloses SEQ ID NOS 1368-1406, respectively, in order of appearance. Figure41H discloses SEQ ID NOS 1407-1424, respectively, in order of appearance. FIG. 411 discloses SEQ II) NOS 1425-1460, respectively, in order of appearance. FIG. 41J discloses SEQ ID NOS 1461-1471, respectively, in order of appearance. FIG. 41K discloses SEQ ID NOS 1472-1489, respectively, in order of appearance. FIG. 41L discloses the “Repeat” sequences as SEQ ID NOS 1490-1499, the “Spacer” sequences as SEQ ID NOS 1500-1509, and the “Downstream” sequences as SEQ ID NOS 1510-1519, all respectively, in order of appearance. FIG. 41L also discloses SEQ ID NO: 1520 below the table. FIG. 41M discloses SEQ ID NOS 1521-1528, respectively, in order of appearance.

[0132] FIGS. 42A-42N-2. FIG. 42A-B shows the Table presenting the analysis of Type VI (C2c2 protein-encoding) loci. *CRISPR—CRISPR repeat; unk hypothetical protein;→direction of gene coding sequence; [D]—degenerate repeat (defined where it was possible); [T]—tracrRNA. FIG. 42C-I shows CRISPR arrays analysis of Type VI (C2c2 protein-encoding) loci as disclosed herein (CRISPR section is basic output of pilercr (see pilercr site for description of output: www.drive5.com/pilerer/); repeat folding was done with infold (see infold site for description of output mfold.rna.albany.edu/?q=mfold/DNA-Folding-Form); repeat folding and CRISPRS array are placed after detailed description of each case; for CRISPR location see link in the Table in FIG. 42A-B). FIG. 42J shows CRISPRmap classification of CRISPR repeats of Type VI (C2c2 protein-encoding) loci as disclosed herein using CRISPRmap (see rna.informatik.uni-freiburg.de/CRISPRmap/Input.jsp for details). FIG. 42K-L shows degenerate repeats of Type VI (C2c2 protein-encoding) loci as disclosed herein found using CRISPRs finder (crisp.u-psud.fr/Server/). Normal repeat column contains normal repeat, spacer—the last spacer, downstream downstream region starting from degenerate repeat (250 bp); array number corresponds to the number of CRISPR array in the respective locus (see the Table in FIG. 42A-B); region highlighted in yellow has a perfect match between normal repeat and degenerate repeat (other part of degenerate repeat does not match). FIG. 42M-N shows predicted structures of tracrRNAs base-paired with the repeats. Putative tracrRNAs were identifed based on presence of an anti-direct repeat (DR) sequence. Anti-DRs were identifed using Geneious (www.geneious.com) by searching for sequences within each respective CRISPR locus that are highly homologus to DR. The 5′ and 3′ ends of each putative tracrRNA was determined though computational prediction of bacterial transcription start and termination sites using BPROM (www.softberry.com) and ARNOLD (rna.ig-mors.u-psud.fr/toolbox/arnold/) respectively. Co-folding predictions were generated using Geneious. 5′ ends are colored blue and 3′ ends are colored orange. FIG. 42C discloses SEQ ID NOS 1529-1557, respectively, in order of appearance, FIG. 42D discloses SEQ ID NOS 1558-1583, respectively, in order of appearance, FIG. 42E discloses SEQ ID NOS 1584-1623, respectively, in order of appearance. FIG. 42F discloses SEQ ID NOS 1624-1645, respectively, in order of appearance, FIG. 42G discloses SEQ ID NOS 1646-1660, respectively, in order of appearance. FIG. 42H discloses SEQ ID NOS 1661-1678, respectively, in order of appearance. FIG. 421 discloses SEQ ID NOS 1679-1689, respectively, in order of appearance. FIG. 42J discloses SEQ ID NOS 1690-1719, respectively, in order of appearance. FIGS. 42K-L disclose “Normal Repeat” sequences as SEQ ID NOS 1720-1735. “Spacer” sequences as SEQ ⁻NOS 1736-1751, and “Downstream” sequences as 1752-1767, all respectively, in order of appearance. FIG. 42M discloses SEQ ID NOS 1768-1771, respectively, in order of appearance. FIG. 42N discloses SEQ ID NOS 1772-1775, respectively, in order of appearance.

[0133] FIGS. 43A-43F. FIG. 43A-B shows the Table presenting the analysis of Type V-C (C2c3 protein-encoding) loci. *CRISPR CRISPR repeat; unk hypothetical protein;→direction of gene coding sequence; [D]—degenerate repeat (defined where it was possible). FIG. 43C—shows CRISPR arrays analysis of Type V-C (C2c3 protein-encoding) loci as disclosed herein (CRISPR section is basic output of CRISPRfinder (see for description: crispr.u-psud.fr/Server/), repeat folding was done with mfoid (see infold site for description of output: mfold.rna.albany.edu/?q=mfold/DNA-Folding-Form); repeat folding and CRISPRS array are placed after detailed description of each case; for CRISPR location see link in the Table in FIG. 43A-B). Statistically significant spacer's blast hits in prokaryotes or their viruses are shown. FIG. 43E shows CRISPRmap classification of CRISPR repeats of Type V-C (C2c3 protein-encoding) loci as disclosed herein using CRISPRmap (see rna.informatik.uni-freiburg.de/CRISPRmap/Input.jsp for details). FIG. 43F shows degenerate repeats of Type V-C (C2c3 protein-encoding) loci as disclosed herein found using CRISPRs finder (crispr.u-psud.fr/Server/). Normal repeat column contains normal repeat, spacer—the last spacer, downstream—downstream region starting from degenerate repeat (250 bp); array number corresponds to the number of CRISPR array in the respective locus (see the Table in FIG. 43A-B); region highlighted in yellow has a perfect match between normal repeat and degenerate repeat (other part of degenerate repeat does not match). FIG. 43C discloses SEQ ID NOS 1776-1807, respectively, in order of appearance. FIG. 43D discloses SEQ ID NOS 1808-1828, respectively, in order of appearance. FIG. 43E discloses SEQ ID NOS 1829-1834, respectively, in order of appearance. FIG. 43F discloses SEQ ID NOS 1835-1837, respectively, in order of appearance.

[0134] FIGS. 44A-44E-2 provides complete list of CRISPR-Cas loci in the genomes where C2c1 or C2c2 proteins were found. Genes for C2c1 and C2c2 proteins are highlighted in yellow. FIGS. 44A-44E disclose SEQ ID NOS 1838-1886, respectively, in order of appearance.

[0135] FIGS. 45A-45C shows alignment of Listeria loci encoding putative Type VI CRISPR-Cas system. The aligned syntenic region corresponds to Listeria weihenstephanensis FSL R9-0317 contig AODJ01000004.1, coordinates 42281-46274 and Listeria newyorkensis strain FSL M6-0635 contig JNFB01000012.1, coordinates 169489-173541. Color coding: C2c2 gene is highlighted by blue CRISPR repeats—red, degenerated repeat—magenta, spacers—bold. FIGS. 45A-45C disclose SEQ ID NOS 1887-1888, respectively, in order of appearance.

[0136] FIG. 46 shows the two C2c2 loci of Carnobacterium gallinarum.

[0137] FIG. 47 shows a schematic indicating the expression level of two CRISPR arrays in the direction of the C2c2 gene at the first C2c2 locus. Figure discloses SEQ ID NOS 1889-1890, respectively, in order of appearance.

[0138] FIG. 48 shows a schematic indicating the expression level of CRISPR arrays with direction of transcription in the direction of the C2c2 gene at the second C2c2 locus. Figure discloses SEQ ID NOS 1891-1892, respectively, in order of appearance.

[0139] FIGS. 49A-49B. FIGS. 49A-49B shows expression and processing of C2c2 loci. FIG. 49A: RNA-sequencing of the Listeria seeligeria serovar 1/2b str. SLCC3954 C2c2 locus expressed in E. coli. The locus is highly expressed with a processed crRNA showing a 5′ 29-nt and 15-18nt spacer. The putative tracrRNA shows no expression. in silica RNA-folding of the processed crRNA direct repeat shows a strong hairpin. FIG. 49B: Northern blot analysis of the Leptotrichia shahii DSM 19757 expressed in E. coli shows processed crRNAs with a 5′ DR. Arrows indicate the probe positions and their directionality. FIG. 49A discloses SEQ ID NOS 1893-1894, respectively, in order of appearance.

[0140] FIGS. 50A-50C. FIGS. 50A-C shows expression and processing of the Leptotrichia shahii DSM 19757 C2c2 locus. FIG. 50A: RNA-sequencing of the Leptotrichia shahii DSM 19757 locus expressed in E. coli shows processing of the CRISPR array in the 3′ to 5′ direction (direction of the locus). crRNAs are processed to have a 5′ DR that is 28nt in length and spacers with lengths 14-28nt. FIG. 50B RNA-sequencing of the endogenous Leptotrichia shahii DSM 19757 C2c2 locus shows similar results to FIG. 50A. FIG. 50C: In silico folding of the L. shahii crRNA DR predicts stable secondary structure. FIG. 50A discloses SEQ ID NO: 1895. FIG. 50B discloses SEQ ID NO: 1896. FIG. 50C discloses SEQ ID NO: 1897.

[0141] FIG. 51 shows evolutionary scenario for the CRISPR-Cas systems. The Cas8 protein is hypothesized to have evolved by inactivation of Cas10 (shown by the white X) which was accompanied by a major acceleration of evolution. Abbreviations: TR., terminal repeats; TS, terminal sequences; HD, HD family endonuclease; HNH, HNH family endonuclease; RuvC, RuvC family endonuclease; HEPN, putative endoribonuclease of HEPN superfamily. Genes and protein regions shown in gray denote sequences that were encoded in the respective mobile elements but were eliminated in the course of evolution of CRISPR-Cas systems.

[0142] FIG. 52 depicts arrangement of C2c2 gene locus, including domains belonging to the HEPN domain superfamily. The majority of HEPN domains contain conserved motifs and constitute metal-independent endoRNases.

[0143] FIG. 53 depicts RNAseq analysis of an endogenous locus from Leptotrichia shahii DSM 19757. Figure discloses SEQ ID NO: 1898.

[0144] FIG. 54 is a cartoon depicting in vivo experiment using E. coli expressing LshC2c2 to identify depleted sequence motifs. A PAM library conferring ampicillin resistance is transferred into E. coli. Plasmids carrying sequence motifs containing a PAM determinant are lost and unable to confer ampicillin resistance. PAM sequence motifs are identified by their depletion.

[0145] FIG. 55 Identification of PAM sequence. Depleted sequences identify the 5′ PAM nucleotides

[0146] FIG. 56 depicts targeting of an endogenous target in E. coli. Interference is indicated by a reduction in colony forming units (cfu) pre 20 ng of plasmid. Interference was observed in E.coli carrying LshC2C but not with a control pACYC184. increased interference is associated with a transcribed target.

[0147] FIG. 57 depicts purification of C2c2 by His-Tag purification followed by one round (left) or three rounds (middle) of gel filtration, and a single 168 kD band by coomassie stain (right).

[0148] FIG. 58 depicts components of in vitro experiments with purified Lsh C2c2 and FPLC purified RNA target. Component “166” indicates a non-complementary target, “E” indicate EDTA. Cleavage of crRNA is observed when present with C2c2.

[0149] FIG. 59 depicts in vitro experiments with purified C2c2 ,RNA target and crRNAs with spacer lengths of 2-26 nucleotides, Cleavage of crRNAs with 28 or 24 nt spacers is observed.

[0150] FIG. 60 depicts an electrophoretic mobility shift assay (EMSA) useful to detect protein complexes with nucleic acids.

[0151] FIG. 61 depicts targeting in vivo of transcribed red fluorescent protein (RFP) using RFP spacers matching or complementary to RNA, Spacers targeting transcribed RFP were cloned into the Lsh C2c2 locus followed by expression in E. coli carrying a plasmid expressing RFP or a pUC19 plasmid control. Interference was determined on the basis of colony forming units (cfu) per 20 ng of transformed plasmid.

[0152] FIG. 62 depicts strand-dependent interference with plasmid carrying an RFP target. Interference was measured as colony forming units (cfu) for 6 RFP targets (left panel). Interference was observed to depend on the strand targeted and the PAM nucleotide present. Interference with non-targeted pUC19 control plasmid was not observed (right panel).

[0153] FIGS. 63A-63C. FIG. 63 depicts effect on RFP expression of C2c2 with targeting RNA complementary or non-complementary to expressed RNA, A Schematic of RFP targeting in heterologous E. coli system. LshC2c2 loci harboring spacers targeting REP at various PAMs were introduced into RFP-expressing E. coli. B Quantitation of RFP targeting in E. coli for multiple spacers targeting A, C, or U PAMs. RFP expression was measured by flow cytometry. C Quantitation of RFP targeting in E. coli Spacers with various PAMs targeting either the non-coding strand (“DNA”) or coding strand (“RNA”) of the RFP gene were introduced and RFP expression was measured by flow cytometry. FIG. 63A discloses SEQ ID NO: 1899.

[0154] FIG. 64 depicts processing of direct repeat (DR) sequences by LshC2c2. LshC2c2 processes the DR on the 5′ end. Figure discloses SEQ ID NO: 1900.

[0155] FIG. 65 depicts strategy for investigating target site selection. Target 1 (T1) contains a G PAM, Target 3 (T3) contains a C PAM.

[0156] FIG. 66 depicts results of a C2c2 RNA cleavage reaction targeted to T3 (see FIG 65). Reaction components are indicated.

[0157] FIG. 67 depicts results of a C2c2 RNA cleavage reaction targeted to TI (see FIG. 65). Reaction components are indicated.

[0158] FIG. 68 depicts C2c2-mediated cleavage directed to RNA expressed from a DNA template in vitro. Reaction components are indicated. Lanes 2-8: C2c2-mediated cleavage is targeted to T1 (see FIG. 65). Lanes 9-15: C2c2-mediated cleavage is targeted to the reverse complement of TI.

[0159] FIG. 69 depicts C2c2-mediated cleavage directed to RNA expressed from a DNA template in vitro. Reaction components are indicated. Lanes 2-8: C2c2-mediated cleavage is targeted to T3 (see FIG. 65).

[0160] FIG. 70 depicts RNA fragment sizes observed for C2c2-mediated cleavage targeted to T1 or T3 (see FIG. 65).

[0161] FIG. 71 depicts C2c2 mediated RNA cleavage of targets T1 and T3. There are multiple cleavage products and significant reduction in intensity of the target band. Buffer 1: 40 mM Tris-HCl (pH 7.9), 6 mM MgCL₂, 83 mM NaCl, 1 mM DTT, rNTPs, T7 polymerase. Buffer 2: 25 mM Tris-HCl (pH 7.5), 10 mM MgCL₂, 83 mM NaCl, 5 mM DTT. Buffer 2 replicates reaction conditions without DNA template.

[0162] FIG. 72 shows mutation of either HEPN domain abolishes RNA targeting.

[0163] FIG. 73 shows a schematic overview of an RNA PAM screen using MS2 phage interference. A library consisting of spacers targeting all possible sequences in the MS2 RNA genome was cloned into the LshC2c2 CRISPR array. Cells with this library population were then treated with phage and plated, and surviving cells were harvested. Frequency of spacers were compared to an phage-untreated control, and phage-enriched spacers were used for generation of sequence logos.

[0164] FIG. 74 indicates that RNA phage interference screen shows both strong enrichment and depletion of LshC2c2 spacers by RNA PAM screen using MS2 phage interference.

[0165] FIGS. 75A-75J. FIGS. 75A-C shows identification of a single base right PAM for LshC2c2 by RNA PAM screen using MS2 phage interference. More particularly it shows the presence of a right H PAM (not G). FIG. 75C shows the quantitation of MS2 plaque assay validating the presence of the PAM. Multiple spacers targeting each PAM were cloned into the LshC2c2 locus. Phage dilutions were spotted on bacteria plates and interference was quantified by highest dilution without plaques. FIG. 75D shows representative images from validation of MS2 plaque assay showing reduced plaque fortnation in H PAM spacers, but not in G PAM spacers. FIG. 75E shows nuclease activity with G PAM spacers and resistance with H PAM spacers. FIG. 75F shows a schematic of the RNA target, showing the protospacer region and the corresponding crRNA. FIG. 75G shows denaturing gel demonstrating ssRNA cleavage activity of LshC2c2 using an RNA target that is 5′ labeled with IRDye 800 and 3′ labeled with Cy5. Four independent cleavage sites are observed. FIG. 75 H shows a denaturing gel demonstrating the H PAM (not G). ssRNA cleavage activity is dependent on the nucleotide immediately 3′ of the target site. The PAM was tested by mutating this adjacent nucleotide and using the same crRNA/target site. FIG. 75I is a schematic showing the positions of tiled crRNAs to demonstrate retargeting of LshC2c2 and the H PAM (top panel) and the corresponding denaturing gel (bottom panel). Five different crRNAs were tested for each possible nucleotide. Also shown is a denaturing gel demonstrating the H PAM using different crRNAs tiled along the length of the ssRNA target. Five different crRNAs were tested for each possible nucleotide. FIG. 75J shows a denaturing gel testing the presence of a spacer motif. Three crRNAs with every possible last nucleotide as the last base of the spacer sequence were tested. FIG. 75D discloses SEQ ID NOS 1901-1904, respectively, in order of appearance. FIG. 75F discloses SEQ ID NOS 1905-1906, respectively, in order of appearance. FIG. 71I discloses SEQ ID NOS 1907-1910, respectively, in order of appearance.

[0166] FIG. 76 shows for LshC2c2 RNA phage MS2 restriction. Cloned spacers targeting each of the four MS2 genes, with C and G PAMs. G PAMs require higher phage concentrations for plaque development.

[0167] FIG. 77 shows that targeting of RFP transcripts in bacteria slows growth rate.

[0168] FIGS. 78A-78D. FIGS. 78A-B demonstrates that LshC2c2 efficiently cleaves RNA. Mini gel readout; non fluorescence. FIG. 78C demonstrates ssRNA cleavage by LshC2c2 using a 5′ labeled and 3′ labeled target were assayed at the indicated time points. FIG. 78D shows the quantitation of data of FIG. 78B.

[0169] FIG. 79. LshC2c2 protein and crRNA were incubated and serially diluted. ssRNA cleavage was assayed using the indicated complex concentrations.

[0170] FIG. 80 demonstrates that LshC2c2 efficiently cleaves RNA. 20 cm gel readout; 700 nm fluorescent imaging. Cleavage is observed just with a smaller 85 nt RNA target instead of the usual 173 nt target.

[0171] FIG. 81 shows mapping of cleavage fragments.

[0172] FIG. 82 shows RNA-sequencing of in vitro nuclease reaction

[0173] FIG. 83 demonstrates that LshC2c2 does not cleave untranscribed or transcribed DNA in an E. coli RNAP in vitro assay. Assay set-up as described in Samai et al. (Cell, 2015). 200 bp target is used (corresponding to RNA target of FIG. 82). 1 h incubation at 37° C. for concurrent transcription and cleavage after open complex formation.

[0174] FIG. 84 demonstrates that LshC2c2 does not cleave ssDNA in vitro. 1 h incubation at 37° C., ssDNA version of t3 G-PAM and its reverse complement (RC).

[0175] FIGS. 85A-85B. FIG. 85 demonstrates that C2c2 does not cleave dsDNA (A) and ssDNA (B). Band gel extracted and prepared for next generation sequencing by Illumina MiSeq.

[0176] FIG. 86 demonstrates that LshC2c2 has a 3′ G PAM for RNA cleavage. Same target with varying PAMs. (PAM sequence shown is on reverse complement, such that 5′ C corresponds to 3′G).

[0177] FIG. 87 demonstrates that LshC2c2 does not require the small RNA for RNA cleavage.

[0178] FIG. 88 demonstrates that LshC2c2 is reprogrammable and PAM sensitive.

[0179] FIG. 89 demonstrates that LshC2c2 is reprogrammable and PAM sensitive.

[0180] FIGS. 90A-90B. FIGS. 90A and B demonsrate ssRNA cleavage was assayed using crRNAs of varied spacer length. FIG. 90B discloses SEQ ID NOS 1911-1914, respectively, in order of appearance.

[0181] FIGS. 91A-91C. FIGS. 91A, B, and C demonstrates ssRNA cleavage was assayed using crRNAs of varied DR length. RNA cleavage is crRNA length dependent (FIG. 91A, B). RNA cleavage is DR length dependent FIG. 91C-E). FIG. 91A discloses SEQ ID NO: 1915. FIG. 91B discloses SEQ ID NO: 1916. FIG. 91C discloses SEQ ID NO: 1917.

[0182] FIGS. 92A-92D. FIGS. 92A, B, C, and D show LshC2c2 cr Stem Modifications and demonstrates that Stem is amenable to individual base swaps but activity is disrupted by most secondary structure changes. DR Truncation experiments also indicate that disruption of the stem abolishes cleavage. FIG. 92A discloses SEQ ID NOS 1918-1927, respectively, in order of appearance. FIG. 9D discloses SEQ ID NOS 1928-1937, top to bottom, left to right, respectively, in order of appearance.

[0183] FIGS. 93A-93D. FIGS. 93A , B, C, and D shows LshC2c2 cr loop Modifications and demonstrates that the crRNA loop is amenable to base changes and extension but not truncation. FIG. 93A discloses SEQ ID NOS 1938-1947, respectively, in order of appearance. FIG. 93D discloses SEQ ID NOS 1948-1956, respectively, in order of appearance.

[0184] FIG. 94 demonstrates that C2c2 processes its own array . . . Buffer 1: 40 mM Tris-HCl (pH 7.9), 6 mM MgC12, 70 mM NaCl, 1 mM DTT. Buffer 2: 40 mM Tris-HCl (pH 7.3), 6 mM MgCl2, 70 mM NaCl, 1 mM DTT, Murine RNAse inhibitor. LshC2c2 cleaves both array 1 and array 2 (arrays of different lengths) in both buffers tested. Cleavage is evident by generation of lower bands

[0185] FIG. 95 demonstrates that HEPN mutants still process the c2c2 CRISPR array.

[0186] FIG. 96 demonstrates that processing of the C2c2 array in E coli requires the protein.

[0187] FIGS. 97A-97D. FIG. 97 A schematic shows different HEPN mutations in C2c2. Schematic of locus and LshC2c2 protein, showing conserved residues in HEPN domains. FIG. 97B and C demonstrate that each of the HEPN mutants significantly lack activity. C top panel: Denaturing gel showing conserved residues of the HEPN motif are necessary for ssRNA cleavage. C bottom panel: Quantitation of MS2 plaque assay with HEPN catalytic residue mutants. Loci with mutant LshC2c2 were unable to protect against phage. D. Quantitation of RFP targeting in E. coli with arginine HEPN catalytic residue mutants. Loci with mutant LshC2c2 were unable to knock down RFP. FIG. 97C discloses SEQ ID NOS 1957-1958, respectively, in order of appearance. FIG. 97D discloses SEQ ID NO: 1959.

[0188] FIG. 98 shows bystander effect. Once active, C2c2 seems to become active and. degrade other RNAs in the sample. Top panel: L=long target, small=small target , LC=long target with C PAM. Bottom panel: effect of presence or absence of activator target on cleavage of different bystander targets.

[0189] FIGS. 99A-99C. FIG. 99A demonstratres that the C2c2 :HEPN mutant still binds the crRNA. Figures B and C demonstrate the influence of secondary structure of the RNA on cleavage product of the target RNA. FIG. 99B discloses SEQ ID NOS 2225-2228, respectively, in order of appearance.

[0190] FIGS. 100A-100B. FIG. 100A shows the effect of different divalent cations on C2c2 activity. FIG. 100B shows the effect of crRNA titration in the presence or absence of magnesium.

[0191] FIG. 101 shows a denaturing gel demonstrating ssRNA cleavage activity of LshC2c2 using an RNA target that is 5′ labeled with IRDye 800 and 3′ labeled with Cy5. Four independent cleavage sites are observed. This figures also shows the effect of Mg++ chelation on ssRNA cleavage activity.

[0192] FIG. 102 demonstrates that C2c2 cuts 3′ of the target site.

[0193] FIG. 103 demonstrates that C2c2 cuts 3′ of target site. Figure discloses SEQ ID NO: 1960.

[0194] FIG. 104 shows C2c2 reprogramming with crRNAs. Figure discloses SEQ ID NO: 1961.

[0195] FIG. 105 shows C2c2 reprogramming with crRNAs.

[0196] FIG. 106 shows C2c2 reprogramming with crRNAs.

[0197] FIG. 107 shows IVC (in vitro nuclease reaction) of a long target.

[0198] FIG. 108 shows bystander effect. Reduced cleavage is observed in absence of magnesium.

[0199] FIGS. 109-1 to 109-2 illustrates the sequences alignment of the following orthologs of the Leptotrichia shahii DSM 19757 C2c2: Rhodobacter capsulatus SB 1003 (RcS); Rhodobacter capsulatus 8121 (RcR); Rhodobacter capsulatus DE442 (RcD); Lachnospiraceae bacterium MA2020 (Lb(X)); Lachnospiraceae bacterium NK4A179 (Lb(X); [Clostridium] aminophilum DSM 10710 (CaC); Lachnospiraceae bacterium NK4A144 (Lb(X); Leptotrichia wadei F0279 (Lew); Leptotrichia wadei F0279 (Lew); Carnobacterium gallinarum DSM 4847 (Cg); Carnobacterium gallinarum DSM 4847 (Cg); Paludibacter propionicigenes WB4 (Pp); Listeria seeligeri serovar 1/2b (Ls); Listeria weihenstephanensis FSL R9-0317 (Liw); and Listeria bacterium FSL M6-0635 (Lib).

[0200] FIG. 110 depicts conserved HEPN domains of C2c2 proteins. Figure discloses SEQ ID NOS 1962-2057, respectively, in order of appearance.

[0201] FIG. 11. L Demonstrates that C2c2 HEPN mutains retain targeted binding activity. Top panels: electrophoretic mobility shift assay with wild type LshC2c2-crRNA complex against on-target ssRNA and non-targeting complementary ssRNA. Bottom panels: electrophoretic mobility shift assay with HEPN mutant R1278A LshC2c2-crRNA complex against on-target ssRNA and non-targeting complementary ssRNA.

[0202] FIGS. 112A-112D. FIG. 112 Effect of RNA target-crRNA mismatches on LshC2c2 RNAse activity. A. Quantitation of MS2 plaque assay testing single mismatches at various positions in the spacer. Single mismatches have minimal effect on phage interference. Locations of mismatches are shown in red; all mismatches are transversions. B. Quantitation of MS2 plaque assay testing double mismatches at various positions in the spacer. Consecutive double mismatches in the middle of the spacer eliminate phage interference. Locations of mismatches are shown in red; all mismatches are transversions. C. in vitro Lshc2c2 cleavage assaying single mismatches in the crRNA. Single mismatches have minimal effect on ssRNA cleavage. Locations of mismatches are shown in red; all mismatches are transversions. D. in vitro Lshc2c2 cleavage assaying double mismatches in the crRNA. Consecutive double mismatches in the middle of the crRNA abrogate LshC2c2 activity. Locations of mismatches are shown in red; all mismatches are transversions. FIG. 112A discloses SEQ ID NO: 2058. FIG. 112B discloses SEQ ID NO: 2059. FIG. 112C discloses SEQ ID NO: 2060. FIG. 112D discloses SEQ ID NO: 2061.

[0203] FIG. 113-1 to 113-3. Cleavage of three ssRNA targets that have the same crRNA target sequence flanked by different sequences. The secondary structure and sequence of each of the three targets is shown (top) and the cleavage patterns of each target by C2c2 are shown using a 10% PAGE gel (bottom). Figure discloses SEQ ID NOS 2062-2067, respectively, in order of appearance.

[0204] FIGS. 114A-114B-2. Mapping of C2c2 cleavage sites by RNA sequencing A by position; B by secondary structure. A Plots of the frequence of cleavage ends observed in RNA-sequencing data for 5′ anchored fragments. This data is projected onto secondary structure in (B). B The cleavage sites of targets 1 and 3 were mapped using RNA-sequencing of the cleavage reaction, The frequency of ends of each fragment (anchored at the 5′ end) are mapped to z-scores and projected onto the secondary structure of the target. FIG. 114B discloses SEQ ID NOS 2068-2071, respectively, in order of appearance.

[0205] FIGS. 115A-115I shows further target environment secondary structures useful for evaluation of C2c2 cleavage efficiency and cleavage site mapping.

[0206] FIGS. 116A-116E, Heterologous expression of the Leptotrichia shahii C2c2 locus mediates robust interference of RNA phage in Escherichia coli. (A) Schematic for the MS2 bacteriophage interference screen. A library consisting of spacers targeting all possible sequences in the MS2 RNA genome was cloned into the LshC2c2. CRISPR array. Cells transformed with the MS2-targeting spacer library were then treated with phage and plated, and surviving cells were harvested. The frequency of spacers was compared to an untreated control (no phage), and enriched spacers from the phage-treated condition were used for the generation of PAM sequence logos. (B) Box plot showing the distribution of normalized crRNA frequencies for the phage-treated condition and control screen biological replicates (n=2). The box extends from the first to third quartile with whiskers denoting the 1st and 99th percentiles. The mean is indicated by the red horizontal bar. (C) Sequence logo generated from sequences flanking the 3′ end of protospacers corresponding to enriched spacers, revealing the presence of a 3′ H PAM (not G), (D) Plaque assay used to validate the functional significance of the H PAM in MS2 interference. All protospacers flanked by non-G PAMs exhibited robust phage interference. Spacer were designed to target the MS2 mat gene and their sequences are shown above the plaque images; the spacer used in the non-targeting control is not complementary to any sequence in either the E. coli or MS2 genome. Phage spots were applied as series of half-log dilutions. (E) Quantitation of MS2 plaque assay validating the H (non-G) PAM requirement. 4 MS2-targeting spacers were designed for each PAM. Phage dilutions were spotted onto bacterial plates as series of half-log dilutions and interference was estimated based on the highest dilution without plaques. Each point on the scatter plot represents the average of three biological replicates and corresponds to a single spacer. Bars indicate the mean of 4 spacers for each PAM and errors are shown as the s.e.m. FIG. 116A discloses SEQ ID NOS 2072-2076, respectively, in order of appearance. FIG. 116D discloses SEQ ID NOS 2077-2080, respectively, in order of appearance.

[0207] FIGS. 117A-117D. LshC2c2 and crRNA mediate RNA-guided ssRNA cleavage. (A) Schematic of the ssRNA substrate being targeted by the crRNA. The protospacer region is highlighted in blue and the PAM is indicated by the magenta bar. (B) A denaturing gel demonstrating crRNA-mediated ssRNA cleavage by LshC2c2, The ssRNA target is either 5′ labeled with IRDye 800 or 3′ labeled with Cy5. Cleavage requires the presence of the crRNA and is abolished by addition of EDTA. Four cleavage sites are observed. (C) A denaturing gel demonstrating the requirement for an H PAM (not G). Four ssRNA substrates that are identical except for the PAM base (indicated by the magenta X in the schematic) were used for the in vitro cleavage reactions. ssRNA cleavage activity is dependent on the nucleotide immediately 3′ of the target site. (D) Schematic showing five protospacers for each PAM on the ssRNA target (top), Denaturing gel showing crRNA-guided ssRNA cleavage activity. crRNAs correspond to protospacer numbering. FIG. 1117A discloses SEQ ID NOS 2081-2082, respectively, in order of appearance. FIG. 117D discloses SEQ ID NO: 2083.

[0208] FIGS. 118A-118I. C2c2 cleavage sites are determined by secondary structure and sequence of the target RNA. (A) Schematic of homopolymer ssRNA targets. The protospacer is indicated by the light blue bar. Homopolymer stretches of A (green) and U (red) bases are interspaced by individual bases of G (orange) and C (purple). (B) Denaturing gel showing C2c2-crRNA-mediated cleavage patterns of each homopolymer. (C) Denaturing gel showing C2c2-crRNA-mediated cleavage of three non-homopolymeric ssRNA targets (1, 4, 5) that share the same protospacer but are flanked by different sequences. Despite identical protospacers, different flanking sequences resulted in different cleavage patterns. (D, F, and H) The cleavage sites of non-homopolymer ssRNA targets 1(I)), 4 (F), and 5 (H) were mapped using RNA-sequencing of the cleavage products. The frequency of cleavage at each base is colored according to the z-score and shown on the predicted crRNA-ssRNA co-fold secondary structure. Fragments used to generate the frequency analysis contained the complete 5′ end. The 5′ and 3′ end of the ssRNA target are indicated by blue and red outlines respectively. The 5′ and 3′ end of the spacer (outlined in yellow) is indicated by blue and orange highlights respectively. (E, G, and I) Plots of the frequencies of cleavage sites for each position of ssRNA targets 1, 4, and 5 for all reads that begin at the 5′ end. The protospacer is indicated by the blue highlighted region. FIG. 118D discloses SEQ ID NOS 2084-2085, respectively, in order of appearance. FIG. 118F discloses SEQ ID NOS 2086-2087, respectively, in order of appearance. FIG. 118H discloses SEQ ID NOS 2088-2089, respectively, in order of appearance.

[0209] FIGS. 119A-119E. The two HEPN domains of C2c2 are necessary for crRNA-guided ssRNA cleavage but not for crRNA-guided ssRNA-binding. (A) Schematic of the LshC2c2 locus and the domain organization of the LshC2c2 protein, showing conserved residues in HEPN domains. (B) Quantification of MS2 plaque assay with HEPN catalytic residue mutants. For each mutant, the same crRNA targeting protospacer 35 was used. (C) Denaturing gel showing conserved residues of the HEPN motif are necessary for crRNA-guided ssRNA cleavage. (D) Electrophoretic mobility shift assay (EMSA) evaluating affinity of the wild type LshC2c2-crRNA complex against a targeted (left) and a non-targeted (right) ssRNA substrate. The non-targeted ssRNA substrate is the reverse-complement of the targeted ssRNA. EDTA is supplemented to reaction condition to reduce any cleavage activity. (E) Electrophoretic mobility shift assay with LshC2c2(R1278A)-crRNA complex against on-target ssRNA and non-targeting complementary ssRNA (same substrate sequences as in D). FIG. 119E discloses SEQ ID NOS 2090-2091, respectively, in order of appearance.

[0210] FIGS. 120A-120B. RNA-guided RNase activity of LshC2c2 is dependent on spacer and direct repeat lengths. (A) Denaturing gel showing crRNA-guided cleavage of ssRNA 1 as a. function of spacer length. (B) Denaturing gel showing crRNA-guided cleavage of ssRNA 1 as a function of the direct repeat length. FIG. 120A discloses SEQ ID NOS 2092-2095, respectively, in order of appearance. FIG. 120B discloses SEQ ID NO: 2096.

[0211] FIGS. 121A-121B. RNA-guided RNase activity of LshC2c2 is dependent on direct repeat structure and sequence. (A) Schematic showing modifications to the crRNA direct repeat stem (top). Altered bases are shown in red. Denaturing gel showing crRNA-guided cleavage of ssRNA 1 by each modified crRNA (bottom). (B) Schematic showing modifications to the loop region of the crRNA direct repeat (top). Altered bases are shown in red and deletion lengths are indicated by arrows. Denaturing gel showing crRNA-guided cleavage of ssRNA 1 by each modified crRNA (bottom). FIG. 121A discloses SEQ ID NOS 2097-2106, top to bottom, left to right, respectively, in order of appearance. FIG. 121B discloses SEQ ID NOS 2107-2115, respectively, in order of appearance.

[0212] FIGS. 122A-122D. Effect of RNA target-crRNA mismatches on LshC2c2 RNase activity. (A) Quantification of MS2 plaque assays testing single mismatches at various positions in the spacer. Single mismatches have minimal effect on phage interference. Locations and identity of mismatches are shown in red. (B) Quantification of MS2 plaque assays testing double mismatches at various positions in the spacer. Consecutive double mismatches in the middle of the spacer eliminate phage interference. Locations and identity of mismatches are shown in red. (C) Schematic showing the position and identity of mismatches (red) in the crRNA spacer (top). Denaturing gel showing cleavage of ssRNA 1 guided by crRNAs with single mismatches in the spacer (bottom). (I)) Schematic showing the position and identity of pairs of mismatches (red) in the crRNA spacer (top). Denaturing gel showing cleavage of ssRNA 1 guided by crRNAs with pairs of mismatches in the spacer (bottom). FIG. 122A discloses SEQ ID NOS 2116-2123, respectively, in order of appearance. FIG. 122B discloses SEQ ID NOS 2124-2129, respectively, in order of appearance. FIG. 122C discloses SEQ ID NOS 2130-2138, respectively, in order of appearance. FIG. 122D discloses SEQ ID NOS 2139-2145, respectively, in order of appearance.

[0213] FIGS. 123A-123E, REP mRNA knockdown by retargeting LshC2c2. (A) Schematic showing crRNA-guided knockdown of RFP in E. coil heterologously expressing the LshC2c2 locus. Three UP-targeting spacers were selected for each non-G PAM and each protospacer on the RFP mRNA is numbered. (B) RFP mRNA-targeting spacers effected RFP knockdown whereas DNA-targeting spacers (coding strand of the RFP gene on the expression plasmid, indicated as “rc” spacers) did not affect RFP expression. n=3 biological replicates. (C) Quantification of REP knockdown in E. coli, Three spacers each targeting C, U, or A PAM-flanking protospacers (9 spacers, numbered 5-13 as indicated in panel (A)) in the RFP mRNA were introduced and RFP expression was measured by flow cytometry. Each point on the scatter plot represents the average of three biological replicates and corresponds to a single spacer. Bars indicate the mean of 4 spacers for each PAM and errors are shown as the s.e.m. (D) Timeline of E. coli growth assay. (E) Effect of RFP mRNA targeting on the growth rate of E. coli transformed with an inducible UP expression plasmid as well as the LshC2c2 locus with non-targeting, RNA targeting (spacer complementary to RFP gene non-coding strand), and DNA targeting (spacer complementary to RFP gene coding strand) spacers. FIG. 123A discloses SEQ ID NOS 2146-2148, respectively, in order of appearance.

[0214] FIGS. 124A-124B. crRNA-guided target ssRNA cleavage activates non-specific RNase activity of LshC2c2. (A) Schematic of the biochemical assay for assaying non-specific RNase activity on non-crRNA-targeted collateral RNA molecules. In addition to the unlabeled crRNA-targeted ssRNA substrate, a second ssRNA with 3′ fluorescent labeling is added to the same reaction to readout non-specific RNase activity. (B) Denaturing gel showing non-specific RNase activity against non-targeted ssRNA substrates in the presence of target RNA. The non-targeted ssRNA. substrate is not cleaved in the absence of the crRNA-targeted ssRNA substate.

[0215] FIG. 125. C2c2 is an RNA adaptive immune system with possible involvement in abortive infection via programmed cell death or dormancy induction.

[0216] FIG. 126. RNA-sequencing of the Leptotrichia shahii locus heterologously expressed. in E. coli and spacer analysis. Adapted from S. Shmakov et al., Discovery and Functional Characterization of Diverse Class 2 CRISPR-Cas Systems. Mol Cell 60, 385-397 (2015). Heterologous expression of the LshC2c2 locus reveals processing of the array. Insert: In silico co-folding analysis of a mature direct repeat. Figure discloses SEQ ID NOS 2149-2150, respectively, in order of appearance.

[0217] FIGS. 127A-127D. MS2 phage screen replicates show agreement and do not have a 5′ PAM. (A) Comparison of control (no phage) replicates show agreement and lack of enrichment or depletion. (B) Comparison of phage replicates reveals both substantial depletion as well as an enriched population shared between both replicates. (C) Sequence logo of 5′ sequence from enriched spacers admits no PAM. (D) Base frequency of 5′ sequence from enriched spacers admits no 5′ PAM.

[0218] FIGS. 128A-128G. MS2 phage screen spacer representation across each PAM. (A) Box plot showing the distribution of spacer frequencies with spacers grouped by their 3′ PAM for phage treated conditions. Box extends from the first to third quartile with the whiskers denoting the 1st percentile and 99th percentile. ****, p<0.0001. (B) Multiple comparison test (ANOVA with Tukey correction) between all possible PAM pairs for the phage treated spacer distributions, Plotted are the confidence intervals for difference in means between the compared PAM pairs. (C) Box plot showing the distribution of spacer frequencies with spacers grouped by their 3′ PAM for non-phage treated conditions. Box extends from the first to third quartile with the whiskers denoting the 1st percentile and 99th percentile. ****, p <0.0001. (D) Multiple comparison test (ANOVA with Tukey correction) between all possible PAM pairs for the non-phage treated spacer distributions. Plotted are the confidence intervals for difference in means between the compared PAM pairs. (E) Cumulative frequency plots for the log2 normalized spacer counts. Spacers are separated by respective PAM to show the enrichment differences between each PAM distribution. (F) The average cumulative frequency difference between the phage and no phage cumulative frequency curves. The differences are shown for each PAM distribution. (G) A zoomed in plot of the dotted box in (F) to highlight the variation in enrichment between the different PAMs.

[0219] FIGS. 129A-129B. Top hits from MS2 phage screen show interference in plaque assay. (A) Images from validation of MS2 screen by plaque assay showing reduced plaque formation in top hits. Phage dilutions were spotted on bacteria plates at decreasing numbers of plaque forming units (PFU). Spacer targets are shown above images; biological replicates are labeled BR1, BR2, or BR3. Non-targeting control is the native LshC2c2. locus. (B) Quantitation of MS2 plaque assay demonstrating interference by top hits. Interference was quantified by highest dilution without plaques. FIG. 129A discloses SEQ ID NOS 2151-2154, respectively, in order of appearance.

[0220] FIGS. 130-1 to 130-2. MS2 plaque assay validates the 3′ H PAM. Four spacers for each possible 3′ PAM (A, G, C, and. U) are cloned into the pLshC2c2 vector and tested for MS2 phage restriction in a plaque forming assay. The images show significantly reduced plaque formation for A, C, and U PAMs, and less restriction for the G PAM. Phage dilutions were spotted on bacteria plates at decreasing numbers of plaque forming units (PFU). Spacer targets are shown above images; three biological replicates are vertically stacked under each protospacer sequence Non-targeting controls are the native LshC2c2 locus and the pACYC184 backbone. Figure discloses SEQ ID NOS 2155-2170, respectively, in order of appearance.

[0221] FIGS. 131A-131D. Protein purification of LshC2c2. (A) Cooma.ssie blue stained acrylamide gel of purified LshC2c2 stepwise purification. A strong band just above 150 kD is consistent with the size of LshC2c2 (171 kD). (13) Size exclusion gel filtration of LshC2c2. LshC2c2 eluted at a size approximately >160 kD (62.9 mL). (C) Protein standards used to calibrate the Superdex 200 column. BDex=Blue Dextran (void volume), Aid=Aldolase (158 kD), Ov=Ovalbumin (44 kD), RibA=Ribonuclease A (13.7 ID), Apr=Aprotinin (6.5 kD). (D) Calibration curve of the Superdex 200 column. Kav is calculated as (elution volume—void volume)/(geometric column volume—void volume). Standards were plotted and fit to a logarithmic curve.

[0222] FIGS. 132A-132B. Further in vitro characterization of the RNA cleavage kinetics of LshC2c2. (A) A time series of LshC2c2 ssRNA cleavage using a 5′- and 3-end-labeled target 1. (B) RNA-cleavage of 5′- and 3-end-labeled target 1 using LshC2c2-crRNA complex that is serially diluted in half-log steps.

[0223] FIG. 133. Characterization of the metal dependence of LshC2c2 RNA cleavage. A variety of divalent metal cations are supplemented for the LshC2c2 cleavage reaction using 5′-end-labeled target 1. Significant cleavage is only observed for Mg+2. Weak cleavage is observed for Ca+2 and Mn+2.

[0224] FIGS. 134A-134D. LshC2c2 has no observable cleavage activity when using dsRNA, dsDNA, or ssDNA substrates. (A) A schematic of the partial dsRNA target. 5′-end-labeled target 1 is annealed to two shorter RNAs that are complementary to the regions flanking the protospacer site. This partial dsRNA is a more stringent test for dsRNA cutting since it should still allow for LshC2c2 complex binding to ssRNA. (B) LshC2c2 cleavage activity of a dsRNA target shown in (A) compared to the ssRNA target 1. No cleavage is observed when using the dsRNA substrate. (C) LshC2c2 cleavage of a dsDNA plasmid library. A plasmid library was generated to have seven randomized nucleotides 5′ of protospacer 14 to account for any sequence requirements for dsDNA cleavage. No cleavage is observed for this dsDNA library. (D) A ssDNA version of target 1 is tested for cleavage by LshC2c2. No cleavage is observed.

[0225] FIGS. 135A-135B. LshC2c2 has no observable cleavage activity on dsDNA targets in a co-transcriptional cleavage assay. (A) Schematic of co-transcriptional cleavage assay. C2c2 was incubated with E. coli RNA polymerase (RNAP) elongation complexes and rNTP as previously described (P. Samai et al., Co-transcriptional DNA and RNA Cleavage during Type III CRISPR-Cas Immunity. Cell 161, 1164-1174 (2015)). (B) LshC2c2 cleavage of DNA target after co-transcriptional cleavage assay. No cleavage is observed.

[0226] FIG. 136. MS2 restriction assay reveals that single HEPN mutants abrogate LshC2c2 activity. All four possible single HEPN mutants were generated in the pLshC2c2 vector (R597A, H602A, R1278A, and H1283A) with protospacer 1. Images from plaque assay testing these HEPN mutant loci show similar plaque formation to the non-targeting locus and is significantly higher than the WtC2c2 locus. Phage dilutions were spotted on bacteria plates at decreasing numbers of plaque forming units (PFU). Spacer targets are shown above images; biological replicates are labeled BR1, BR2, or BR3. Non-targeting control is the native LshC2c2 locus. Figure discloses SEQ II) NO: 2171.

[0227] FIGS. 137A-137F. Quantitation of LshC2c2 binding. (A) Calculation of binding affinity for wildtype LshC2c2-crRNA complex and on-target ssRNA. Fraction of protein bound was quantified by densitometry from FIG. 4D and KD was calculated by fitting to binding isotherm. (B) Calculation of binding affinity for HEPN mutant R1278A LshC2c2-crRNA complex and on-target ssRNA. Fraction of protein bound was quantified by densitometry from FIG. 4E and KD was calculated by fitting to binding isotherm. (C) Electrophoretic mobility shift assay with HEPN mutant R1278A LshC2c2 against on-target ssRNA in the absence of crRNA. EDTA is supplemented to reaction condition. (D) Electrophoretic mobility shift assay crRNA against on-target ssRNA. EDTA is supplemented to reaction condition. (E) Calculation of binding affinity for HEPN mutant R1278A LshC2c2 and on-target ssRNA in the absence of crRNA. Fraction of protein bound was quantified by densitometry from Fig. S12C and KD was calculated by fitting to binding isotherm. (F) Calculation of binding affinity for crRNA and on-target ssRNA. Fraction of crRNA bound was quantified by densitometry from Fig. S12D and KD was calculated by fitting to binding isotherm.

[0228] FIG. 138. MS2 restriction assay testing the effect of single and double mismatches on LshC2c2 activity. pLshC2c2 with protospacer 41 was modified to have a series of single mismatches and consecutive double mismatches as shown. Images from plaque assay testing these mismatched spacers reveals reduced plaque formation for the single-mismatch spacers on-par with the fully complementary spacer. The double mismatch spacers show increased plaque formation for a seed region in the middle of spacer sequence. Phage dilutions were spotted on bacteria plates at decreasing numbers of plaque forming units (PFLI). Spacer targets are shown above images; biological replicates are labeled BR1, BR2, or BR3. Non-targeting control is the native LshC2c2 locus. Figure discloses SEQ ID NOS 2173-2185, respectively, in order of appearance.

[0229] FIG. 139. HEPN mutant LshC2c2 are tested for RFP mRNA targeting activity. The pLshC2c2 vector with protospacer 36 was modified to have the single HEPN mutants R597A and R1278A (one in each of the HEPN domains). These mutations resulted in little detectable RFP knockdown as measured by flow cytometry on the E. coli. Figure discloses SEQ ID NOS 2186-2187, respectively, in order of appearance.

[0230] FIGS. 140A-140B. Biochemical characterization of the collateral cleavage effect. (A) LshCc2 is incubated with a crRNA targeting protospacer 14 with and without unlabeled ssRNA. target 1 (contains protospacer 14). When LshC2c2 is in the presence of target 1, sigriif cant cleavage activity is observed for fluorescently labeled non-complementary targets 6-9. (B) HEPN mutant collateral activity is compared to WT C2c2. The proteins are incubated with crRNA complementary to protospacer 14 and with and without unlabeled homopolymer targets 2 or 3 (both containing protospacer 14). The collateral effect is no longer observed with the HEPN mutant proteins on the fluorescently labeled non-complementary target 8.

[0231] FIGS. 141A-141B. Growth suppression is correlated with RFP knockdown in cells that express C2c2 and RFP-targeting crRNA. FIG. 141A shows the effect on growth of inducible RFP expression in E. coli expressing C2c2 and a crRNA that targets RFP. RFP was expressed using an anhydrotetracycline (aTc)-inducible gene expression system. Cell cultures were treated with aTe at the concentrations indicated. Increasing aTc expression suppressed growth. FIG. 141B shows the effect on growth of inducible RFP expression when a non-targeting crRNA was substituted for the RFP-targeting crRNA.

[0232] FIGS. 142A-142D. C2c2 preferentially cleaves at poly U tracts. ssRNA cleavage by C2c2 was examined using ssRNA substrate containing or lacking a poly U tract. End-labeled ssRNA was incubated with C2c2 and crRNA and digestion products resolved. Poly U-containing substrate RNA was efficiently cleaved. Substrate cleavage was crRNA-dependent as shown by absence of digestion products when C2c2 but not crRNA was present. Panels A and B: 3′-end labeled substrate, Panels C and D: 5′-end labeled substrate. Panels B and D indicate substrate cleavage was efficient and specific as substrate concentration was increased.

[0233] FIGS. 143A-143B. Cleavage of target RNA with mismatched crRNA is position dependent. ssRNA target was treated with crRNA containing double (panel A) or triple (panel B) mismatches and LshC2c2. Products of cleavage reactions were separated by electrophoresis. FIG. 143A discloses SEQ ID NOS 2188-2200, respectively, in order of appearance. FIG. 143B discloses SEQ ID NOS 2201-2207, respectively, in order of appearance.

[0234] FIG. 144. Cleavage of target RNA is sensitive to mutations and deletions in the 3′ direct repeat region. ssRNA target was treated with LshC2c2 and crRNA containing mismatches or deletions designed to disrupt secondary structure in the DR region. Products of cleavage reactions were separated by electrophoresis. FIG. 144 discloses SEQ ID NOS 2208-2224, respectively, in order of appearance.

[0235] FIGS. 145A-145B, C2c2 and MS2-crRNA can bind ssRNA. FIG. 145A:. Binding of a LshC2c2(R1278A) which is defective for substrate cleavage, to ssRNA was tested. FIG .145B: LshC2c2(R1278A) and MS2-crRNA were incubated with increasing amounts of labeled ssRNA 10 (left panel) or labeled reverse complement (RC) of ssRNA 10 (right panel). (See Table B for ssRNA 10 sequence).

[0236] FIG. 146. C2c2 complex does not bind ssDNA. LshC2c2(R1278A) and MS2-crRNA were incubated with increasing amounts of ssDNA 10 (left panel) or ssDNA 10 reverse complement (RC) (right panel). (See Table B for ssRNA 10 sequence).

[0237] The figures herein are for illustrative purposes only and are not necessarily drawn to scale.

### DETAILED DESCRIPTION OF THE INVENTION

[0238] In general, a CRISPR-Cas or CRISPR system as used in the foregoing documents, such as WO 2014/093622 (PCT/US2013/074667) and refers collectively to transcripts and other elements involved in the expression of or directing the activity of CRISPR-associated (“Cas”) genes, including sequences encoding a Cas gene, a tracr (trans-activating CRISPR) sequence (e.g. tract⁻RNA or an active partial tracrRNA), a tracr-mate sequence (encompassing a “direct repeat” and a tracrRNA-processed partial direct repeat in the context of an endogenous CRISPR system), a guide sequence (also referred to as a “spacer” in the context of an endogenous CRISPR system), or “RNA.(s)” as that term is herein used (e.g., RNA(s) to guide Cas, such as Cas9, e.g. CRISPR RNA and transactivating (tracer) RNA or a single guide RNA (sgRNA) (chimeric RNA)) or other sequences and transcripts from a CRISPR locus. In general, a CRISPR system is characterized by elements that promote the formation of a CRISPR complex at the site of a target sequence (also referred to as a protospa.cer in the context of an endogenous CRISPR system). When the CRISPR protein is a C2c2 protein, a tracrRNA is not required.

[0239] In the context of formation of a CRISPR complex, “target sequence” refers to a sequence to which a guide sequence is designed to have complementarity, where hybridization between a target sequence and a guide sequence promotes the formation of a CRISPR complex. A target sequence may comprise any polynucleotide, such as DNA or RNA polynucleotides. in some embodiments, a target sequence is located in the nucleus or cytoplasm of a cell. In some embodiments, direct repeats may be identified in silico by searching for repetitive motifs that fulfill any or all of the following criteria: 1. found in a 2Kb window of genomic sequence flanking the type II CRISPR locus; 2. span from 20 to 50 bp; and 3. interspaced by 20 to 50 bp. In some embodiments, 2 of these criteria may be used, for instance 1 and 2, 2 and 3, or 1 and 3. In some embodiments, all 3 criteria may be used.

[0240] In embodiments of the invention the terms guide sequence and guide RNA, i.e. RNA capable of guiding Cas to a target genomic locus, are used interchangeably as in foregoing cited documents such as WO 2014/093622 (PCUUS2013/074667). In general, a guide sequence is any polynucleotide sequence having sufficient complementarity with a target polynucleotide sequence to hybridize with the target sequence and direct sequence-specific binding of a CRISPR complex to the target sequence. In some embodiments, the degree of complementarity between a guide sequence and its corresponding target sequence, when optimally aligned using a suitable alignment algorithm, is about or more than about 50%, 60%, 75%, 80%, 85%, 90%, 95%, 97.5%, 99%, or more. Optimal alignment may be determined with the use of any suitable algorithm for aligning sequences, non-limiting example of which include the Smith-Waterman algorithm, the Needleman-Wunsch algorithm, algorithms based on the Burrows-Wheeler Transform (e.g. the Burrows Wheeler Aligner), ClustalW, Clustal X, BLAT, Novoalign (Novocraft Technologies; available at www.novocraft.com), ELAND (Illumina, San Diego, Calif.), SOAP (available at soap.genomics.org.cn), and Maq (available at maq.sourceforge.net). In some embodiments, a guide sequence is about or more than about 5, 10, 11, 12, 13, 14, 15, 16, 17, 18, 19, 20, 21, 22, 23, 24, 25, 26, 27, 28, 29, 30, 35, 40, 45, 50, 75, or more nucleotides in length. In some embodiments, a guide sequence is less than about 75, 50, 45, 40, 35, 30, 25, 20, 15, 12, or fewer nucleotides in length. Preferably the guide sequence is 10 30 nucleotides long. The ability of a guide sequence to direct sequence-specific binding of a CRISPR complex to a target sequence may be assessed by any suitable assay. For example, the components of a CRISPR system sufficient to form a CRISPR complex, including the guide sequence to be tested, may be provided to a host cell having the corresponding target sequence, such as by transfection with vectors encoding the components of the CRISPR sequence, followed by an assessment of preferential cleavage within the target sequence, such as by Surveyor assay as described herein. Similarly, cleavage of a target polynucleotide sequence may be evaluated in a test tube by providing the target sequence, components of a CRISPR complex, including the guide sequence to be tested and a control guide sequence different from the test guide sequence, and comparing binding or rate of cleavage at the target sequence between the test and control guide sequence reactions. Other assays are possible, and will occur to those skilled in the art.

[0241] In a classic CRISPR-Cas systems, the degree of complementarity between a guide sequence and its corresponding target sequence can be about or more than about 50%, 60%, 75%, 80%, 85%, 90%, 95%, 97.5%, 99%, or 100%; a guide or RNA or sgRNA can be about or more than about 5, 10, 11, 12, 13, 14, 15, 16, 17, 18, 19, 20, 21, 22, 23, 24, 25, 26, 27, 28, 29, 30, 35, 40, 45, 50, 75, or more nucleotides in length; or guide or RNA or sgRNA can be less than about 75, 50, 45, 40, 35, 30, 25, 20, 15, 12, or fewer nucleotides in length. However, an aspect of the invention is to reduce off-target interactions, e.g., reduce the guide interacting with a target sequence having low complementarity. Indeed, in the examples, it is shown that the invention involves mutations that result in the CRISPR-Cas system being able to distinguish between target and off-target sequences that have greater than 80% to about 95% complementarity, e.g., 83%-84% or 88-89% or 94-95% complementarity (for instance, distinguishing between a target having 18 nucleotides from an off-target of 18 nucleotides having 1, 2 or 3 mismatches). Accordingly, in the context of the present invention the degree of complementarily between a guide sequence and its corresponding target sequence is greater than 94.5% or 95% or 95.5% or 96% or 96.5% or 97% or 97.5% or 98% or 98.5% or 99% or 99.5% or 99.9%, or 100%. Off target is less than 100% or 99.9% or 99.5% or 99% or 99% or 98.5% or 98% or 97.5% or 97% or 96.5% or 96% or 95.5% or 95% or 94.5% or 94% or 93% or 92% or 91% or 90% or 89% or 88% or 87% or 86% or 85% or 84% or 83% or 82% or 81% or 80% complementarity between the sequence and the guide, with it advantageous that off target is 100% or 99.9% or 99.5% or 990 or 99% or 98.5% or 98% or 97.5%or 97% or 96.5% or 96% or 95.5% or 95% or 94.5% complementarity between the sequence and the guide.

[0242] In certain embodiments, modulations of cleavage efficiency can be exploited by introduction of mismatches, e.g. 1 or more mismatches, such as 1 or 2 mismatches between spacer sequence and target sequence, including the position of the mismatch along the spacer/target. The more central (i.e. not 3′ or 5′) for instance a double mismatch is, the more cleavage efficiency is affected. Accordingly, by chasing mismatch position along the spacer, cleavage efficiency can be modulated. By means of example, if less than 100% cleavage of targets is desired (e.g. in a cell population), 1 or more, such as preferably 2 mismatches between spacer and target sequence may be introduced in the spacer sequences. The more central along the spacer of the mismatch position, the lower the cleavage percentage.

[0243] The methods according to the invention as described herein comprehend inducing one or more nucleotide modifications in a eukaryotic cell (iii vitro, i.e. in an isolated eukaryotic cell) as herein discussed comprising delivering to cell a vector as herein discussed. The mutation(s) can include the introduction, deletion, or substitution of one or more nucleotides at each target sequence of cell(s) via the guide(s) RNA(s) or sgRNA(s). The mutations can include the introduction, deletion, or substitution of 1-75 nucleotides at each target sequence of said cell(s) via the guide(s) RNA(s) . The mutations can include the introduction, deletion, or substitution of 1, 5, 10, 11, 12, 13, 14, 15, 16, 17, 18, 19, 20, 21, 22, 23, 24, 25, 26, 27, 28, 29, 30, 35, 40, 45, 50, or 75 nucleotides at each target sequence of said cell(s) via the guide(s) RNA(s). The mutations can include the introduction, deletion, or substitution of 5, 10, 11, 12, 13, 14, 15, 16, 17, 18, 19, 20, 21, 22, 23, 24, 25, 26, 27, 28, 29, 30, 35, 40, 45, 50, or 75 nucleotides at each target sequence of said cell(s) via the guide(s) RNA(s) . The mutations include the introduction, deletion, or substitution of 10, 11, 12, 13, 14, 15, 16, 17, 18, 19, 20, 21, 22, 23, 24, 25, 26, 27, 28, 29, 30, 35, 40, 45, 50, or 75 nucleotides at each target sequence of said cell(s) via the guide(s) RNA(s). The mutations can include the introduction, deletion, or substitution of 20, 21, 22, 23, 24, 25, 26, 27, 28, 29, 30, 35, 40, 45, 50, or 75 nucleotides at each target sequence of said cell(s) via the guide(s) RNA(s). The mutations can include the introduction, deletion, or substitution of 40, 45, 50, 75, 100, 200, 300, 400 or 500 nucleotides at each target sequence of said cell(s) via the guide(s) RNA(s).

[0244] For minimization of toxicity and off-target effect, it will be important to control the concentration of Cas mRNA or protein and guide RNA delivered. Optimal concentrations of Cas mRNA or protein and guide RNA can be determined by testing different concentrations in a cellular or non-human eukaryote animal model and using deep sequencing the analyze the extent of modification at potential off-target genomic loci.

[0245] Typically, in the context of an endogenous CRISPR system, formation of a CRISPR complex (comprising a guide sequence hybridized to a target sequence and complexed with one or more Cas proteins) results in cleavage in or near (e.g. within 1, 2, 3, 4, 5, 6, 7, 8, 9, 10, 20, 50, or more base pairs from) the target sequence.

[0246] The nucleic acid molecule encoding a Cas is advantageously codon optimized Cas. An example of a codon optimized sequence, is in this instance a sequence optimized for expression in a eukaryote, e.g., humans (i.e. being optimized for expression in humans), or for another eukaryote, animal or mammal as herein discussed; see, e.g., SaCas9 human codon optimized sequence in WO 2014/093622 (PCT/US2013/074667). Whilst this is preferred, it will be appreciated that other examples are possible and codon optimization for a host species other than human, or for codon optimization for specific organs is known. In some embodiments, an enzyme coding sequence encoding a Cas is codon optimized for expression in particular cells, such as eukaryotic cells. The eukaryotic cells may be those of or derived from a particular organism, such as a mammal, including but not limited to human, or non-human eukaryote or animal or mammal as herein discussed, e.g., mouse, rat, rabbit, dog, livestock, or non-human mammal or primate. In some embodiments, processes for modifying the germ line genetic identity of human beings and/or processes for modifying the genetic identity of animals which are likely to cause them suffering without any substantial medical benefit to man or animal, and also animals resulting from such processes, may be excluded. In general, codon optimization refers to a process of modifying a nucleic acid sequence for enhanced expression in the host cells of interest by replacing at least one codon (e.g. about or more than about 1, 2, 3, 4, 5, 10, 15, 20, 25, 50, or more codons) of the native sequence with codons that are more frequently or most frequently used in the genes of that host cell while maintaining the native amino acid sequence. Various species exhibit particular bias for certain codons of a particular amino acid. Codon bias (differences in codon usage between organisms) often correlates with the efficiency of translation of messenger RNA (mRNA), which is in turn believed to be dependent on, among other things, the properties of the codons being translated and the availability of particular transfer RNA (tRNA) molecules. The predominance of selected tRNAs in a cell is generally a reflection of the codons used most frequently in peptide synthesis. Accordingly, genes can be tailored for optimal gene expression in a given organism based on codon optimization. Codon usage tables are readily available, for example, at the “Codon Usage Database” available at www.kazusa.orjp/codon/and these tables can be adapted in a number of ways. See Nakamura, Y., et al. “Codon usage tabulated from the international DNA sequence databases: status for the year 2000” Nucl. Acids Res. 28:292 (2000). Computer algorithms for codon optimizing a particular sequence for expression in a particular host cell are also available, such as Gene Forge (Aptagen; Jacobus, PA), are also available. In some embodiments, one or more codons (e.g. 1, 2, 3, 4, 5, 10, 15, 20, 25, 50, or more, or all codons) in a sequence encoding a Cas correspond to the most frequently used codon for a particular amino acid.

[0247] In certain embodiments, the methods as described herein may comprise providing a Cas transgenic cell in which one or more nucleic acids encoding one or more guide RNAs are provided or introduced operably connected in the cell with a regulatory element comprising a promoter of one or more gene of interest. As used herein, the term “Cas transgenic cell” refers to a cell, such as a eukaryotic cell, in which a Cas gene has been genomically integrated. The nature, type, or origin of the cell are not particularly limiting according to the present invention. Also the way how the Cas transgene is introduced in the cell is may vary and can be any method as is known in the art. In certain embodiments, the Cas transgenic cell is obtained by introducing the Cas transgene in an isolated cell. In certain other embodiments, the Cas transgenic cell is obtained by isolating cells from a Cas transgenic organism. By means of example, and without limitation, the Cas transgenic cell as referred to herein may be derived from a Cas transgenic eukaryote, such as a Cas knock-in eukaryote. Reference is made to WO 2014/093622 (PCT/US13/74667), incorporated herein by reference. Methods of US Patent Publication Nos. 20120017290 and 20110265198 assigned to Sangamo BioSciences, Inc. directed to targeting the Rosa locus may be modified to utilize the CRISPR Cas system of the present invention. Methods of US Patent Publication No. 20130236946 assigned to Cellectis directed to targeting the Rosa locus may also be modified to utilize the CRISPR Cas system of the present invention. By means of further example reference is made to Platt et. al. (Cell; 159(2):440-455 (2014)), describing a Cas9 knock-in mouse, which is incorporated herein by reference. The Cas transgene can further comprise a Lox-Stop-polyA-Lox(LSL) cassette thereby rendering Cas expression inducible by Cre recombinase. Alternatively, the Cas transgenic cell may be obtained by introducing the Cas transgene in an isolated cell. Delivery systems for transgenes are well known in the art. By means of example, the Cas transgene may be delivered in for instance eukaryotic cell by means of vector (e.g., AAV, adenovirus, lentivirus) and/or particle and/or nanoparticle delivery, as also described herein elsewhere.

[0248] It will be understood by the skilled person that the cell, such as the Cas transgenic cell, as referred to herein may comprise further genomic alterations besides having an integrated Cas gene or the mutations arising from the sequence specific action of Cas when complexed with RNA capable of guiding Cas to a target locus, such as for instance one or more oncogenic mutations, as for instance and without limitation described in Platt et al. (2014), Chen et al., (2014) or Kumar et al., (2009).

[0249] In some embodiments, the Cas sequence is fused to one or more nuclear localization sequences (NLSs), such as about or more than about 1, 2, 3, 4, 5, 7, 8, 9, 10, or more NLSs. In some embodiments, the Cas comprises about or more than about 1, 2, 3, 4, 5, 6, 7, 8, 9, 10, or more NLSs at or near the amino-terminus, about or more than about 1, 2, 3, 4, 5, 6, 7, 8, 9, 10, or more NLSs at or near the carboxy-terminus, or a combination of these (e.g. zero or at least one or more NLS at the amino-terminus and zero or at one or more NLS at the carboxy terminus) When more than one NLS is present, each may be selected independently of the others, such that a single NLS may be present in more than one copy and/or in combination with one or more other NLSs present in one or more copies. In a preferred embodiment of the invention, the Cas comprises at most 6 NLSs. In some embodiments, an NLS is considered near the N- or C-terminus when the nearest amino acid of the NLS is within about 1, 3, 4, 5, 10, 15, 20, 25, 30, 40, 50, or more amino acids along the polypeptide chain from the N- or C-terminus. Non-limiting examples of NLSs include an NLS sequence derived from: the NLS of the SV40 virus large T-antigen, having the amino acid sequence PKKKRKV(SEQ ID NO: 1); the NLS from nucleoplasmin (e.g. the nucleoplasmin bipartite NLS with the sequence KRPAATKKAGQAKKKK) (SEQ II) NO: 2); the c-myc NLS having the amino acid sequence PAAKRVKLD (SEQ ID NO: 3) or RQRRNELKRSP(SEQ ID NO: 4); the hRNPA1 M9 NLS having the sequence NQSSNFGPMKGGNFGGRSSGPYGGGGQYFAKPRNQGGY(SEQ ID NO: 5); the sequence RMRIZFKNKGKDTAELRRRRVEVSVELRKAKKDEQILKRRNV (SEQ ID NO: 6) of the MB domain from importin-alpha; the sequences VSRKRPRP (SEQ ID NO: 7) and PPKKARED (SEQ ID NO: 8) of the myoma T protein; the sequence PQPKKKPL (SEQ ID NO: 9) of human p53; the sequence SALIKKKKKMAP (SEQ ID NO: 10) of mouse c-abl IV; the sequences DRLRR (SEQ ID NO: 11) and PKQKKRK (SEQ ID NO: 12) of the influenza virus NSI; the sequence RKLKKKIKKL (SEQ ID NO: 13) of the Hepatitis virus delta antigen; the sequence REKKKFLKRR (SEQ ID NO: 14) of the mouse Mx1 protein; the sequence KRKGDEVDGVDEVAKKKSKK (SEQ ID NO: 15) of the human poly(ADP-ribose) polymerase; and the sequence RKCLQAGMNLEARKTKK (SEQ ID NO: 16) of the steroid hormone receptors (human) glucocorticoid. In general, the one or more NLSs are of sufficient strength to drive accumulation of the Cas in a detectable amount in the nucleus of a eukaryotic cell. In general, strength of nuclear localization activity may derive from the number of NLSs in the Cas, the particular NLS(s) used, or a combination of these factors. Detection of accumulation in the nucleus may be performed by any suitable technique. For example, a detectable marker may be fused to the Cas, such that location within a cell may be visualized, such as in combination with a means for detecting the location of the nucleus (e.g. a stain specific for the nucleus such as DAPI). Cell nuclei may also be isolated from cells, the contents of which may then be analyzed by any suitable process for detecting protein, such as immunohistochemistry, Western blot, or enzyme activity assay. Accumulation in the nucleus may also be determined indirectly, such as by an assay for the effect of CRISPR complex formation (e.g. assay for DNA cleavage or mutation at the target sequence, or assay for altered gene expression activity affected by CRISPR complex formation and/or Cas enzyme activity), as compared to a control no exposed to the Cas or complex, or exposed to a Cas lacking the one or more NLSs or NESS. In certain embodiments, other localization tags may be fused to the Cas protein, such as without limitation for localizing the Cas to particular sites in a cell, such as organells, such mitochondria, plastids, chloroplast, vesicles, golgi, (nuclear or cellular) membranes, ribosomes, nucleoluse, ER, cytoskeleton, vacuoles, centrosome, nucleosome, granules, centrioles, etc.

[0250] In certain aspects the invention involves vectors, e.g. for delivering or introducing in a cell Cas and/or RNA capable of guiding Cas to a target locus (i.e. guide RNA), but also for propagating these components (e.g. in prokaryotic cells). A used herein, a “vector” is a tool that allows or facilitates the transfer of an entity from one environment to another. It is a replicon, such as a plasmid, phage, or cosmid, into which another DNA segment may be inserted so as to bring about the replication of the inserted segment. Generally, a vector is capable of replication when associated with the proper control elements. In general, the term “vector” refers to a nucleic acid molecule capable of transporting another nucleic acid to which it has been linked. Vectors include, but are not limited to, nucleic acid molecules that are single-stranded, double-stranded, or partially double-stranded; nucleic acid molecules that comprise one or more free ends, no free ends (e.g. circular); nucleic acid molecules that comprise DNA, RNA, or both; and other varieties of polynucleotides known in the art. One type of vector is a “plasmid,” which refers to a circular double stranded DNA loop into which additional DNA segments can be inserted, such as by standard molecular cloning techniques, Another type of vector is a viral vector, wherein virally-derived DNA or RNA sequences are present in the vector for packaging into a virus (e.g. retroviruses, replication defective retroviruses, adenoviruses, replication defective adenoviruses, and adeno-associated viruses (AAVs)). Viral vectors also include polynucleotides carried by a virus for transfection into a host cell. Certain vectors are capable of autonomous replication in a host cell into which they are introduced (e.g. bacterial vectors having a bacterial origin of replication and episomal mammalian vectors). Other vectors (e.g., non-episomal mammalian vectors) are integrated into the genome of a host cell upon introduction into the host cell, and thereby are replicated along with the host genome. Moreover, certain vectors are capable of directing the expression of genes to which they are operatively-linked. Such vectors are referred to herein as “expression vectors.” Common expression vectors of utility in recombinant DNA techniques are often in the form of plasmids.

[0251] Recombinant expression vectors can comprise a nucleic acid of the invention in a form suitable for expression of the nucleic acid in a host cell, which means that the recombinant expression vectors include one or more regulatory elements, which may be selected on the basis of the host cells to be used for expression, that is operatively-linked to the nucleic acid sequence to be expressed, Within a recombinant expression vector, “operably linked” is intended to mean that the nucleotide sequence of interest is linked to the regulatory element(s) in a manner that allows for expression of the nucleotide sequence (e.g. in an in vitro transcription/translation system or in a host cell when the vector is introduced into the host cell). With regards to recombination and cloning methods, mention is made of U.S. patent application Ser. No. 10/815,730, published Sep. 2, 2004 as US 2004-0171156 A1, the contents of which are herein incorporated by reference in their entirety.

[0252] The vector(s) can include the regulatory element(s), e.g., promoter(s). The vector(s) can comprise Cas encoding sequences, and/or a single, but possibly also can comprise at least 3 or 8 or 16 or 32 or 48 or 50 guide RNA(s) (e.g., sgRNAs) encoding sequences, such as 1-2, 1-3, 1-4 1-5, 3-6, 3-7, 3-8, 3-9, 3-10, 3-8, 3-16, 3-30, 3-32, 3-48, 3-50 RNA(s) (e.g., sgRNAs). In a single vector there can be a promoter for each RNA (e.g., sgRNA), advantageously when there are up to about 16 RNA(s) and, when a single vector provides for more than 16 RNA(s) , one or more promoter(s) can drive expression of more than one of the RNA(s), e.g., when there are 32 RNA(s) , each promoter can drive expression of two RNA(s) , and when there are 48 RNA(s) , each promoter can drive expression of three RNA(s) By simple arithmetic and well established cloning protocols and the teachings in this disclosure one skilled in the art can readily practice the invention as to the RNA(s) for a suitable exemplary vector such as AAV, and a suitable promoter such as the U6 promoter. For example, the packaging limit of AAV is ˜4.7 kb, The length of a single U6-gRNA (plus restriction sites for cloning) is 361 bp. Therefore, the skilled person can readily fit about 12-16, e.g., 13 U6-gRNA cassettes in a single vector. This can be assembled by any suitable means, such as a golden gate strategy used for TALE assembly (www.genome-engineering.org/taleffectors/). The skilled person can also use a tandem guide strategy to increase the number of U6-gRNAs by approximately 1.5 times, e.g., to increase from 12-16, e.g,, 13 to approximately 18-24, e.g., about 19 U6-gRNAs, Therefore, one skilled in the art can readily reach approximately 18-24, e.g., about 19 promoter-RNAs, e.g., U6-gRNAs in a single vector, e.g., an AAV vector. A further means for increasing the number of promoters and RNAs in a vector is to use a single promoter (e.g., U6) to express an array of RNAs separated by cleavable sequences. And an even further means for increasing the number of promoter-RNAs in a vector, is to express an array of promoter-RNAs separated by cleavable sequences in the intron of a coding sequence or gene; and, in this instance it is advantageous to use a polymerase II promoter, which can have increased expression and enable the transcription of long RNA in a tissue specific manner. (see, e.g., nar.oxfordjournals.org/content/34/7/e53.short, www.nature.com/mt/journal/v16/n9/abs/mt2008144a.html). In an advantageous embodiment, AAV may package U6 tandem gRNA targeting up to about 50 genes. Accordingly, from the knowledge in the art and the teachings in this disclosure the skilled person can readily make and use vector(s), e g., a single vector, expressing multiple RNAs or guides under the control or operatively or functionally linked to one or more promoters—especially as to the numbers of RNAs or guides discussed herein, without any undue experimentation.

[0253] The guide RNA(s) encoding sequences and/or Cas encoding sequences, can be functionally or operatively linked to regulatory element(s) and hence the regulatory element(s) drive expression. The promoter(s) can be constitutive promoter(s) and/or conditional promoter(s) and/or inducible promoter(s) and/or tissue specific promoter(s). The promoter can be selected from the group consisting of RNA polymerases, pot I, pol II, pot III, T7, U6, H1, retroviral Rous sarcoma virus (RSV) LTR promoter, the cytomegalovirus (CMV) promoter, the SV40 promoter, the dihydrofolate reductase promoter, the β-actin promoter, the phosphoglycerol kinase (PGK) promoter, and the EF1α promoter. An advantageous promoter is the promoter is U6.

[0254] The CRISPR-Cas loci has more than 50 gene families and there is no strictly universal genes. Therefore, no single evolutionary tree is feasible and a multi-pronged approach is needed to identify new families. So far, there is comprehensive cas gene identification of 395 profiles for 93 Cas proteins. Classification includes signature gene profiles plus signatures of locus architecture. A new classification of CRISPR-Cas systems is proposed in FIGS. 1A and 1B. Class 1 includes multisubunit crRNA-effector complexes (Cascade) and Class 2 includes Single-subunit crRNA-effector complexes (Cas9-like). FIG. 2 provides a molecular organization of CRISPR-Cas. FIG. 3 provides structures of Type I and III effector complexes: common architecture/common ancestry despite extensive sequence divergence. FIG. 4 shows CRISPR-Cas as a RNA recognition motif (RRM)-centered system. FIG. 5 shows Cas1 phylogeny where recombination of adaptation and crRNA-effector modules show a major aspect of CRISPR-Cas evolution. FIG. 6 shows a CRISPR-Cas census, specifically a distribution of CRISPR-Cas types/subtypes among archaea and bacteria.

[0255] The action of the CRISPR-Cas system is usually divided into three stages: (1) adaptation or spacer integration, (2) processing of the primary transcript of the CRISPR locus (pre-crRNA) and maturation of the crRNA which includes the spacer and variable regions corresponding to 5′ and 3′ fragments of CRISPR repeats, and (3) DNA or RNA interference. Two proteins, Cas1 and Cas2, that are present in the great majority of the known CRISPR-Cas systems are sufficient for the insertion of spacers into the CRISPR cassettes These two proteins form a complex that is required for this adaptation process; the endonuclease activity of Cas1 is required for spacer integration whereas Cast appears to perform a nonenzymatic function. The Cas1-Cas2 complex represents the highly conserved “information processing” module of CRISPR-Cas that appears to be quasi-autonomous from the rest of the system. (See Annotation and Classification of CRISPR-Cas Systems. Makarova K S, Koonin E V. Methods Mol Biol. 2015; 1311:47-75).

[0256] The previously described Class 2 systems, namely Type II and the putative Type V, consisted of only three or four genes in the cas operon, namely the cas1 and cas2 genes comprising the adaptation module (the call-cast pair of genes are not involved in interference), a single multidomain effector protein that is responsible for interference but also contributes to the pre-crRNA processing and adaptation, and often a fourth gene with uncharacterized functions that is dispensable in at least some Type II systems (and in some cases the fourth gene is cas4 (biochemical or in silico evidence shows that Cas4 is a PD-(DE)xK superfamily nuclease with three-cysteine C-terminal cluster; possesses 5′-ssDNA exonuclease activity) or csn2, which encodes an inactivated ATPase). In most cases, a CRISPR array and a gene for a distinct RNA species known as tracrRNA, a trans-encoded small CRISPR RNA, are adjacent to Class 2 cas operons. The tracrRNA is partially homologous to the repeats within the respective CRISPR array and is essential for the processing of pre-crRNA. that is catalyzed by RNAse III, a ubiquitous bacterial enzyme that is not associated with the CRISPR-cas loci.

[0257] Cas1 is the most conserved protein that is present in most of the CRISPR-Cas systems and evolves slower than other Cas proteins. Accordingly, Cas1 phylogeny has been used as the guide for CRISPR-Cas system classification. Biochemical or in silico evidence shows that Cas1 is a metal-dependent deoxyribonuclease. Deletion of Cas1 in E. coli results in increased sensitivity to DNA damage and impaired chromosomal segregation as described in “A dual function of the CRISPR-Cassystem in bacterial antivirus immunity and DNA repair,” Babu M et al. Mol Microbiol 79:484-502 (2011), Biochemical or in silico evidence shows that Cas 2 is a RNase specific to U-rich regions and is a double-stranded DNase.

[0258] Aspects of the invention relate to the identification and engineering of novel effector proteins associated with Class 2 CRISPR-Cas systems. In a preferred embodiment, the effector protein comprises a single-subunit effector module. In a further embodiment the effector protein is functional in prokaryotic or eukaryotic cells for in vitro, in vivo or ex vivo applications. An aspect of the invention encompasses computational methods and algorithms to predict new Class 2 CRISPR-Cas systems and identify the components therein.

[0259] In one embodiment, a computational method of identifying novel Class 2 CRISPR-Cas loci comprises the following steps: detecting all contigs encoding the Casl protein; identifying all predicted protein coding genes within 20 kB of the cas1 gene, more particularly within the region 20 kb from the start of the cas1 gene and 20 kb from the end of the cas1 gene; comparing the identified genes with Cas protein-specific profiles and predicting CRISPR arrays; selecting partial and/or unclassified candidate CRISPR-Cas loci containing proteins larger than 500 amino acids (>500 aa); analyzing selected candidates using PSI-BLAST and HHPred, thereby isolating and identifying novel Class 2 CRISPR-Cas loci. In addition to the above mentioned steps, additional analysis of the candidates may be conducted by searching metagenomics databases for additional homologs.

[0260] In one aspect the detecting all contigs encoding the Cas1 protein is performed by GenemarkS which a gene prediction program as further described in “GeneMarkS: a self-training method for prediction of gene starts in microbial genomes. Implications for finding sequence motifs in regulatory regions,” John Besemer, Alexandre Lomsadze and Mark Borodovsky, Nucleic Acids Research (2001) 29, pp 2607-2618, herein incorporated by reference.

[0261] In one aspect the identifying all predicted protein coding genes is carried out by comparing the identified genes with Cas protein-specific profiles and annotating them according to NCBI Conserved Domain Database (CDD) which is a protein annotation resource that consists of a collection of well-annotated multiple sequence alignment models for ancient domains and full-length proteins. These are available as position-specific score matrices (PSSMs) for fast identification of conserved domains in protein sequences via RPS-BLAST. CDD content includes NCBI-curated domains, which use 3D-structure information to explicitly define domain boundaries and provide insights into sequence/structure/function relationships, as well as domain models imported from a number of external source databases (Pfam, SMART, COG, PRK, TIGRFAM). In a further aspect, CRISPR arrays were predicted using a PILER-CR program which is a public domain software for finding CRISPR repeats as described in “PILER-CR: fast and accurate identification of CRISPR repeats”, Edgar, R. C., BMC Bioinformatics, January 20; 8:18(2007), herein incorporated by reference.

[0262] In a further aspect, the case by case analysis is performed using PSI-BLAST (Position-Specific Iterative Basic Local Alignment Search Tool), PSI-BLAST derives a position-specific scoring matrix (PSSM) or profile from the multiple sequence alignment of sequences detected above a given score threshold using protein-protein BLAST. This PSSM is used to further search the database for new matches, and is updated for subsequent iterations with these newly detected sequences. Thus, PSI-BLAST provides a means of detecting distant relationships between proteins.

[0263] In another aspect, the case by case analysis is performed using HHpred, a method for sequence database searching and structure prediction that is as easy to use as BI,A ST or PSI-BLAST and that is at the same time much more sensitive in finding remote homologs. In fact, HHpred's sensitivity is competitive with the most powerful servers for structure prediction currently available. HHpred is the first server that is based on the pairwise comparison of profile hidden Markov models (HMMs). Whereas most conventional sequence search methods search sequence databases such as UniProt or the NR, HHpred searches alignment databases, like Pfam or SMART. This greatly simplifies the list of hits to a number of sequence families instead of a clutter of single sequences. All major publicly available profile and alignment databases are available through HHpred. HHpred accepts a single query sequence or a multiple alignment as input. Within only a few minutes it returns the search results in an easy-to-read format similar to that of PSI-BLAST. Search options include local or global alignment and scoring secondary structure similarity. HHpred can produce pairwise query-template sequence alignments, merged query-template multiple alignments for transitive searches), as well as 3D structural models calculated by the MODELLER software from HHpred alignments.

[0264] The term “nucleic acid-targeting system”, wherein nucleic acid is DNA or RNA, and in some aspects may also refer to DNA-RNA hybrids or derivatives thereof, refers collectively to transcripts and other elements involved in the expression of or directing the activity of DNA or RNA-targeting CRISPR-associated (“Cas”) genes, which may include sequences encoding a DNA or RNA-targeting Cas protein and a DNA or RNA-targeting guide RNA comprising a CRISPR RNA (crRNA) sequence and (in some but not all systems) a trans-activating CRISPR/Cas system RNA (tracrRNA) sequence, or other sequences and transcripts from a DNA or RNA-targeting CRISPR locus. In general, a RNA-targeting system is characterized by elements that promote the formation of a DNA or RNA-targeting complex at the site of a target DNA or RNA sequence. In the context of formation of a DNA or RNA-targeting complex, “target sequence” refers to a DNA or RNA sequence to which a DNA or RNA-targeting guide RNA is designed to have complementarity, where hybridization between a target sequence and a RNA-targeting guide RNA promotes the formation of a RNA-targeting complex. In some embodiments, a target sequence is located in the nucleus or cytoplasm of a cell.

[0265] In an aspect of the invention, novel RNA targeting systems also referred to as RNA- or RNA-targeting CRISPR″Cas or the CRISPR-Cas system RNA-targeting system of the present application are based on identified Type VI Cas proteins which do not require the generation of customized proteins to target specific RNA sequences but rather a single enzyme can be programmed by a RNA molecule to recognize a specific RNA target, in other words the enzyme can be recruited to a specific RNA target using said RNA molecule.

[0266] In an aspect of the invention, novel DNA targeting systems also referred to as DNA- or DNA-targeting CRISPR/Cas or the CRISPR-Cas system RNA-targeting system of the present application are based on identified Type VI Cas proteins which do not require the generation of customized proteins to target specific RNA sequences but rather a single enzyme can be programmed by a RNA molecule to recognize a specific DNA target, in other words the enzyme can be recruited to a specific DNA target using said RNA molecule.

[0267] The nucleic acids-targeting systems, the vector systems, the vectors and the compositions described herein may be used in various nucleic acids-targeting applications, altering or modifying synthesis of a gene product, such as a protein, nucleic acids cleavage, nucleic acids editing, nucleic acids splicing; trafficking of target nucleic acids, tracing of target nucleic acids, isolation of target nucleic acids, visualization of target nucleic acids, etc.

[0268] As used herein, a Cas protein or a CRISPR enzyme refers to any of the proteins presented in the new classification of CRISPR-Cas systems.

[0269] In an advantageous embodiment, the present invention encompasses effector proteins identified in a Type VI CRISPR-Cas loci, e.g. the C2c2 loci. Herein, C2c2 refers to Class 2 candidate 2. The C2c2 loci encompass cast and cas2 genes along with the large protein Applicants denote as C2c2p, and a CRISPR array; however, C2c2p is often encoded next to a CRISPR array but not cas1-cas2 (compare FIG. 9 and FIG. 15).

### C2c2 Nuclease

[0270] The activity of C2c2 depends on the presence of two HEPN domains. These have been shown to be RNase domains, i.e. nuclease (in particular an endonuclease) cutting RNA. C2c2 HEPN may also target DNA, or potentially DNA and/or RNA. On the basis that that the HEPN domains of C2c2 are at least capable of binding to and, in their wild-type form, cutting RNA, then it is preferred that the C2c2 effector protein has RNase function. It may also, or alternatively, have DNase function.

[0271] Thus, in some embodiments, the effector protein may be a RNA-binding protein, such as a dead-Cas type effector protein, which may be optionally functionalized as described herein for instance with an transcriptional activator or repressor domain, NLS or other functional domain. In some embodiments, the effector protein may be a RNA-binding protein that cleaves a single strand of RNA. If the RNA bound is ssRNA, then the ssRNA is fully cleaved. in some embodiments, the effector protein may be a RNA-binding protein that cleaves a double strand of RNA, for example if it comprises two RNase domains. If the RNA bound is dsRNA, then the dsRNA is fully cleaved.

[0272] RNase function in CRISPR systems is known, for example mRNA targeting has been reported for certain type III CRISPR-Cas systems (Hale et al., 2014, Genes Dev, vol. 28, 2432-2443; Hale et al., 2009, Cell, vol. 139, 945-956; Peng et al., 2015, Nucleic acids research, vol. 43, 406-417) and provides significant advantages. In the Staphylococcus epidermis type III-A system, transcription across targets results in cleavage of the target DNA and its transcripts, mediated by independent active sites within the Cas10-Csm ribonucleoprotein effector complex (see, Samai et al., 2015, Cell, vol. 151, 1164-1174). A CRISPR-Cas system, composition or method targeting RNA via the present effector proteins is thus provided.

[0273] The target RNA, i.e. the RNA of interest, is the RNA to be targeted by the present invention leading to the recruitment to, and the binding of the effector protein at, the target site of interest on the target RNA. The target RNA may be any suitable form of RNA. This may include, in some embodiments, mRNA. In other embodiments, the target RNA may include tRNA or rRNA. In other embodiments, the target RNA may include miRNA. in other embodiments, the target RNA may include siRNA.

Interfering RNA (RNAi) and microRNA (miRNA)

[0274] In other embodiments, the target RNA may include interfering RNA, i.e. RNA involved in an RNA interference pathway, such as shRNA, siRNA. and so forth. In other embodiments, the target RNA may include microRNA (miRNA). Control over interfering RNA or miRNA may help reduce off-target effects (OTE) seen with those approaches by reducing the longevity of the interfering RNA or miRNA in vivo or in vitro.

[0275] In certain embodiments, the target is not the miRNA itself, but the miRNA binding site of a miRNA target.

[0276] In certain embodiments, miRNAs may be sequestered (such as including subcellularly relocated). In certain embodiments, miRNAs may be cut, such as without limitation at hairpins.

[0277] In certain embodiments, miRNA processing (such as including turnover) increased or decreased.

[0278] If the effector protein and suitable guide are selectively expressed (for example spatially or temporally under the control of a suitable promoter, for example a tissue- or cell cycle-specific promoter and/or enhancer) then this could be used to ‘protect’ the cells or systems (in vivo or in vitro) from RNAi in those cells. This may be useful in neighbouring tissues or cells where RNAi is not required or for the purposes of comparison of the cells or tissues where the effector protein and suitable guide are and are not expressed (i.e. where the RNAi is not controlled and where it is, respectively). The effector protein may be used to control or bind to molecules comprising or consisting of RNA, such as ribozymes, ribosomes or riboswitches. In embodiments of the invention, the RNA guide can recruit the effector protein to these molecules so that the effector protein is able to bind to them.

[0279] The protein system of the invention can be applied in areas of RNAi technologies, without undue experimentation, from this disclosure, including therapeutic, assay and other applications (see, e.g., Guidi et al., PLoS Negl Trop Dis 9(5): e0003801. doi:1.0.1371/journal.pntd; Crotty et al., In vivo RNAi screens: concepts and applications. Shane Crotty . . . 2015 Elsevier Ltd. Published by Elsevier Inc., Pesticide Biochemistry and Physiology (Impact Factor: 2.01). 01/2015; 120. DOI: 10.1016/j.pestbp.2015.01.002 and Makkonen et al., Viruses 2015, 7(4), 2099-2125; doi:10.3390/v7042099), because the present application provides the foundation for informed engineering of the system.

Ribosomal RNA (rRNA)

[0280] For example, azalide antibiotics such as azithromycin, are well known. They target and disrupt the 50S ribosomal subunit. The present effector protein, together with a suitable guide RNA to target the 50S ribosomal subunit, may be, in some embodiments, recruited to and bind to the 50S ribosomal subunit. Thus, the present effector protein in concert with a suitable guide directed at a ribosomal (especially the 50 s ribosomal subunit) target is provided. Use of this use effector protein in concert with the suitable guide directed at the ribosomal (especially the 50 s ribosomal subunit) target may include antibiotic use. In particular, the antibiotic use is analogous to the action of azalide antibiotics, such as azithromycin. In some embodiments, prokaryotic ribosomal subunits, such as the 705 subunit in prokaryotes, the 50S subunit mentioned above, the 30S subunit, as well as the 165 and 5S subunits may be targeted. In other embodiments, eukaryotic ribosomal subunits, such as the 805 subunit in eukaryotes, the 605 subunit, the 40S subunit, as well as the 28S, 18S. 5.8S and 55 subunits may be targeted.

[0281] In some embodiments, the effector protein may be a RNA-binding protein, optionally functionalized., as described herein. In some embodiments, the effector protein may be a RNA-binding protein that cleaves a single strand of RNA. In either case, but particularly where the RNA-binding protein cleaves a single strand of RNA, then ribosomal function may be modulated and, in particular, reduced or destroyed. This may apply to any ribosomal RNA and any ribosomal subunit and the sequences of rRNA are well known.

[0282] Control of ribosomal activity is thus envisaged through use of the present effector protein in concert with a suitable guide to the ribosomal target. This may be through cleavage of, or binding to, the ribosome. In particular, reduction of ribosomal activity is envisaged. This may be useful in assaying ribosomal function in vivo or in vitro, but also as a means of controlling therapies based on ribosomal activity, in vivo or in vitro. Furthermore, control (i.e. reduction) of protein synthesis in an in vivo or in vitro system is envisaged, such control including antibiotic and research and diagnostic use.

### Riboswitches

[0283] A riboswitch (also known as an aptozyme) is a regulatory segment of a messenger RNA molecule that binds a small molecule. This typically results in a change in production of the proteins encoded by the mRNA. Thus, control of riboswitch activity is thus envisaged through use of the present effector protein in concert with a suitable guide to the riboswitch target. This may be through cleavage of, or binding to, the riboswitch. In particular, reduction of riboswitch activity is envisaged. This may be useffil in assaying riboswitch function in vivo or in vitro, but also as a means of controlling therapies based on riboswitch activity, in vivo or in vitro. Furthermore, control (i.e. reduction) of protein synthesis in an in vivo or in vitro system is envisaged. This control, as for rRNA may include antibiotic and research and diagnostic use.

### Ribozymes

[0284] Ribozymes are RNA molecules having catalytic properties, analogous to enzymes (which are proteins). As ribozymes, both naturally occurring and engineered, comprise or consist of RNA, they may also be targeted by the present RNA-binding effeaor protein. In some embodiments, the effector protein may be a RNA-binding protein cleaves the ribozyme to thereby disable it, Control of ribozymal activity is thus envisaged through use of the present effector protein in concert with a suitable guide to the ribozymal target. This may be through cleavage of, or binding to, the ribozyme. In particular, reduction of ribozymal activity is envisaged. This may be useful in assaying ribozymal function in vivo or in vitro, but also as a means of controlling therapies based on ribozymal activity, in vivo or in vitro.

### Gene Expression, Including RNA Processing

[0285] The effector protein may also be used, together with a suitable guide, to target gene expression, including via control of RNA processing, The control of RNA processing may include RNA processing reactions such as RNA splicing, including alternative splicing, via targeting of RNApol; viral replication (in particular of satellite viruses, bacteriophages and retroviruses, such as HBV, HBC and HIV and others listed herein) including virioids in plants; and tRNA biosynthesis. The effector protein and suitable guide may also be used to control RNAactivation (RNA). RNAa leads to the promotion of gene expression, so control of gene expression may be achieved that way through disruption or reduction of RNAa and thus less promotion of gene expression. This is discussed more in detail below.

### RNAi Screens

[0286] Identifying gene products whose knockdown is associated with phenotypic changes, biological pathways can be interrogated and the constituent parts identified, via RNAi screens. Control may also be exerted over or during these screens by use of the effector protein and suitable guide to remove or reduce the activity of the RNAi in the screen and thus reinstate the activity of the (previously interfered with) gene product (by removing or reducing the interference/repression).

[0287] Satellite RNAs (satRNAs) and satellite viruses may also be treated.

[0288] Control herein with reference to RNase activity generally means reduction, negative disruption or known-down or knock out.

### In Vivo RNA Applications

### Inhibition of Gene Expression

[0289] The target-specific RNAses provided herein allow for very specific cutting of a target RNA. The interference at RNA level allows for modulation both spatially and temporally and in a non-invasive way, as the genome is not modified.

[0290] A number of diseases have been demonstrated to be treatable by mRNA targeting. While most of these studies relate to administration of siRNA, it is clear that the RNA targeting effector proteins provided herein can be applied in a similar way.

[0291] Examples of mRNA targets (and corresponding disease treatments) are VEGF, VEGF-R1 and RTP801 (in the treatment of AMD and/or DMF), Caspase 2 (in the treatment of Naion)ADRB2 (in the treatment of intraocular pressure), TRPVI (in the treatment of Dry eye syndrome, Syk kinase (in the treatment of asthma), Apo B (in the treatment of hypercholesterolemia), PLK1, KSP and VEGF (in the treatment of solid tumors), Ber-Abl (in the treatment of CML)(Burnett and Rossi Chem Biol. 2012, 19(1): 60-71)). Similarly, RNA targeting has been demonstrated to be effective in the treatment of RNA-virus mediated diseases such as HIV (targeting of HIV Tet and Rev), RSV (targeting of RSV nucleocapsid) and HCV (targeting of miR-122) (Burnett and Rossi Chem Biol. 2012, 19(1): 60-71).

[0292] It is further envisaged that the RNA targeting effector protein of the invention can be used for mutation specific or allele specific knockdown. Guide RNA's can be designed that specifically target a sequence in the transcribed mRNA comprising a mutation or an allele-specific sequence. Such specific knockdown is particularly suitable for therapeutic applications relating to disorders associated with mutated or allele-specific gene products. For example, most cases of familial hypobetalipoproteinemia (FHBL) are caused by mutations in the ApoB gene. This gene encodes two versions of the apolipoprotein B protein: a short version (ApoB-48) and a longer version (ApoB-100). Several ApoB gene mutations that lead to FHBL cause both versions of ApoB to be abnormally short. Specifically targeting and knockdown of mutated ApoB mRNA transcripts with an RNA targeting effector protein of the invention may be beneficial in treatment of FHBL. As another example, Huntington's disease (HD) is caused by an expansion of CAG triplet repeats in the gene coding for the Huntingtin protein, which results in an abnormal protein. Specifically targeting and knockdown of mutated or allele-specific mRNA transcripts encoding the Huntingtin protein with an RNA targeting effector protein of the invention may be beneficial in treatment of HD.

[0293] It is noted that in this context, and more generally for the various applications as described herein, the use of a split version of the RNA targeting effector protein can be envisaged. Indeed, this may not only allow increased specificity but may also be advantageous for delivery. The C2c2 is split in the sense that the two parts of the C2c2 enzyme substantially comprise a functioning C2c2. Ideally, the split should always be so that the catalytic domain(s) are unaffected. That C2c2 may function as a nuclease or it may be a dead-C2c2 which is essentially an RNA-binding protein with very little or no catalytic activity, due to typically mutation(s) in its catalytic domains.

[0294] Each half of the split C2c2 may be fused to a dimerization partner. By means of example, and without limitation, employing rapamycin sensitive dimerization domains, allows to generate a chemically inducible split C2c2 for temporal control of C2c2activity. C2c2 can thus be rendered chemically inducible by being split into two fragments and that rapamycin-sensitive dimerization domains may be used for controlled reassembly of the C2c2. The two parts of the split C2c2 can be thought of as the N′ terminal part and the C′ terminal part of the split C2c2. The fusion is typically at the split point of the C2c2. 1n other words, the C′ terminal of the N′ terminal part of the split C2c2 is fused to one of the dimer halves, whilst the N′ terminal of the C′ terminal part is fused to the other dimer half.

[0295] The C2c2 does not have to be split in the sense that the break is newly created. The split point is typically designed in silica and cloned into the constructs. Together, the two parts of the split C2c2, the N′ terminal and C′ terminal parts, form a full C2c2, comprising preferably at least 70% or more of the wildtype amino acids (or nucleotides encoding them), preferably at least 80% or more, preferably at least 90% or more, preferably at least 95% or more, and most preferably at least 99% or more of the wildtype amino acids (or nucleotides encoding them). Some trimming may be possible, and mutants are envisaged. Non-functional domains may be removed entirely. What is important is that the two parts may be brought together and that the desired C2c2 function is restored or reconstituted. The dimer may be a homodimer or a heterodimer.

[0296] In certain embodiments, the C2c2 effector as described herein may be used for mutation-specific, or allele-specific targeting, such as for mutation-specific, or allele-specific knockdown.

[0297] The RNA targeting effector protein can moreover be fused to another functional RNAse domain, such as a non-specific RNase or Argonaute 2, which acts in synergy to increase the RNAse activity or to ensure further degradation of the message.

[0298] Modulation of Gene Expression Through Modulation of RNA Function

[0299] Apart from a direct effect on gene expression through cleavage of the mRNA, RNA targeting can also be used to impact specific aspects of the RNA processing within the cell, which may allow a more subtle modulation of gene expression. Generally, modulation can for instance be mediated by interfering with binding of proteins to the RNA, such as for instance blocking binding of proteins, or recruiting RNA binding proteins. Indeed, modulations can be ensured at different levels such as splicing, transport, localization, translation and turnover of the mRNA. Similarly in the context of therapy, it can be envisaged to address (pathogenic) malfunctioning at each of these levels by using RNA-specific targeting molecules. In these embodiments it is in many cases preferred that the RNA targeting protein is a “dead” C2c2 that has lost the ability to cut the RNA target but maintains its ability to bind thereto, such as the mutated forms of C2c2 described herein.

### a) Alternative Splicing

[0300] Many of the human genes express multiple mRNAs as a result of alternative splicing. Different diseases have been shown to be linked to aberrant splicing leading to loss of function or gain of function of the expressed gene. While some of these diseases are caused by mutations that cause splicing defects, a number of these are not. One therapeutic option is to target the splicing mechanism directly. The RNA targeting effector proteins described herein can for instance be used to block or promote slicing, include or exclude exons and influence the expression of specific isoforms and/or stimulate the expression of alternative protein products. Such applications are described in more detail below.

[0301] A RNA targeting effector protein binding to a target RNA can sterically block access of splicing factors to the RNA sequence. The RNA targeting effector protein targeted to a splice site may block splicing at the site, optionally redirecting splicing to an adjacent site. For instance a RNA targeting effector protein binding to the 5′ splice site binding can block the recruitment of the UI component of the spliceosome, favoring the skipping of that exon. Alternatively, a RNA targeting effector protein targeted to a splicing enhancer or silencer can prevent binding of transacting regulatory splicing factors at the target site and effectively block or promote splicing. Exon exclusion can further be achieved by recruitment of ILF2/3 to precursor mRNA near an exon by an RNA targeting effector protein as described herein. As yet another example, a glycine rich domain can be attached for recruitment of hnRNP A1 and exon exclusion (Del Gatto-Konczak et al. Mol Cell Biol. 1999 January; 19(1):251-60),

[0302] In certain embodiments, through appropriate selection of gRNA, specific splice variants may be targeted, while other splice variants will not be targeted

[0303] In some cases the RNA targeting effector protein can be used to promote slicing (e.g. where splicing is defective). For instance a RNA targeting effector protein can be associated with an effector capable of stabilizing a splicing regulatory stem-loop in order to further splicing. The RNA targeting effector protein can be linked to a consensus binding site sequence for a specific splicing factor in order to recruit the protein to the target DNA.

[0304] Examples of diseases which have been associated with aberrant splicing include, but are not limited to Paraneoplastic Opsoclonus Myoclonus Ataxia (or POMA), resulting from a loss of Nova proteins which regulate splicing of proteins that function in the synapse, and Cystic Fibrosis, which is caused by defective splicing of a cystic fibrosis transmembrane conductance regulator, resulting in the production of nonfunctional chloride channels. In other diseases aberrant RNA splicing results in gain-of-function. This is the case for instance in myotonic dystrophy which is caused by a CUG triplet-repeat expansion (from 50 to >1500 repeats) in the 3′UTR of an mRNA, causing splicing defects.

[0305] The RNA targeting effector protein can be used to include an exon by recruiting a splicing factor (such as UI) to a 5′splicing site to promote excision of introns around a desired exon. Such recruitment could be mediated trough a fusion with an arginine/serine rich domain, which functions as splicing activator (Gravely BR and Maniatis T, Mol Cell. 1998 (5):765-71).

[0306] It is envisaged that the RNA targeting effector protein can be used to block the splicing machinery at a desired locus, resulting in preventing exon recognition and the expression of a different protein product. An example of a disorder that may treated is Duchenne muscular dystrophy (DMD), which is caused by mutations in the gene encoding for the dystrophin protein. Almost all DMD mutations lead to frameshifts, resulting in impaired dystrophin translation. The RNA targeting effector protein can be paired with splice junctions or exonic splicing enhancers (ESEs) thereby preventing exon recognition, resulting in the translation of a partially functional protein. This converts the lethal Duchenne phenotype into the less severe Becker phenotype.

### b) RNA Modification

[0307] RNA editing is a natural process whereby the diversity of gene products of a given sequence is increased by minor modification in the RNA. Typically, the modification involves the conversion of adenosine (A) to inosine (I), resulting in an RNA sequence which is different from that encoded by the genome. RNA modification is generally ensured by the ADAR enzyme, whereby the pre-RNA target forms an imperfect duplex RNA by base-pairing between the exon that contains the adenosine to be edited and an intronic non-coding element. A classic example of A-I editing is the glutamate receptor GluR-B mRNA, whereby the change results in modified conductance properties of the channel (Higuchi M, et al. Cell. 1993; 75:1361-70).

[0308] In humans, a heterozygous functional-null mutation in the ADAR1 gene leads to a skin disease, human pigmentary genodermatosis (Miyamura Y, et al. Am J Hum Genet. 2003; 73:693-9). it is envisaged that the RNA targeting effector proteins of the present invention can be used to correct malfunctioning RNA modification.

[0309] It is further envisaged that RNA adenosine methylase (N(6)-methyladenosine) can be fused to the RNA targeting effector proteins of the invention and targeted to a transcript of interest. This methylase causes reversible methylation, has regulatory roles and may affect gene expression and cell fate decisions by modulating multiple RNA-related cellular pathways (Fu et al Nat Rev Genet. 2014; 15(5):293-306).

### c) Polyadenylation

[0310] Polyadenylation of an mRNA is important for nuclear transport, translation efficiency and stability of the mRNA. , and all of these, as well as the process of polyadenylation, depend on specific RBPs. Most eukaryotic mRNAs receive a 3′ poly(A) tail of about 200 nucleotides after transcription. Polyadenylation involves different RNA-binding protein complexes which stimulate the activity of a poly(A)polymerase (Minvielle-Sebastia L et al. Curr Opin Cell Biol. 1999; 11:352-7). It is envisaged that the RNA-targeting effector proteins provided herein can be used to interfere with or promote the interaction between the RNA-binding proteins and RNA.

[0311] Examples of diseases which have been linked to defective proteins involved in polyadenylation are oculopharyngeal muscular dystrophy (OPMD) (Brais B, et al. Nat Genet, 1998; 18:164-7),

### d) RNA Export

[0312] After pre-mRNA processing, the mRNA is exported from the nucleus to the cytoplasm. This is ensured by a cellular mechanism which involves the generation of a carrier complex, which is then translocated through the nuclear pore and releases the mRNA in the cytoplasm, with subsequent recycling of the carrier.

[0313] Overexpression of proteins (such as TAP) which play a role in the export of RNA has been found to increase export of transcripts that are otherwise ineffeciently exported in Xenopus (Katahira J, et al. EMBO J. 1999; 18:2593-609).

e) mRNA Localization

[0314] mRNA localization ensures spatially regulated protein production. Localization of transcripts to a specific region of the cell can be ensured by localization elements. In particular embodiments, it is envisaged that the effector proteins described herein can be used to target localization elements to the RNA of interest. The effector proteins can be designed to bind the target transcript and shuttle them to a location in the cell determined by its peptide signal tag. More particularly for instance, a RNA targeting effector protein fused to a nuclear localization signal (NLS) can be used to alter RNA localization.

[0315] Further examples of localization signals include the zipcode binding protein (ZBPI) which ensures localization of β-actin to the cytoplasm in several asymmetric cell types, KDEL retention sequence (SEQ ID NO: 17) (localization to endoplasmic reticulum), nuclear export signal (localization to cytoplasm), mitochondrial targeting signal (localization to mitochondria), peroxisomal targeting signal (localization to peroxisome) and m6A marking/YTHDF2 (localization to p-bodies). Other approaches that are envisaged are fusion of the RNA targeting effector protein with proteins of known localization (for instance membrane, synapse).

[0316] Alternatively, the effector protein according to the invention may for instance be used in localization-dependent knockdown. By fusing the effector protein to a appropriate localization signal, the effector is targeted to a particular cellular compartment. Only target RNAs residing in this compartment will effectively be targeted, whereas otherwise identical targets, but residing in a different cellular compartment will not be targeted, such that a localization dependent knockdown can be established.

f) translation

[0317] The RNA targeting effector proteins described herein can be used to enhance or repress translation. It is envisaged that upregulating translation is a very robust way to control cellular circuits. Further, for functional studies a protein translation screen can be favorable over transcriptional upregulation screens, which have the shortcoming that upregulation of transcript does not translate into increased protein production.

[0318] It is envisaged that the RNA targeting effector proteins described herein can be used to bring translation initiation factors, such as EIF4G in the vicinity of the 5′ untranslated repeat (5′UTR) of a messenger RNA of interest to drive translation (as described in De Gregorio et al. EMBO J. 1999; 18(17):4865-74 for a non-reprogrammable RNA binding protein). As another example GLD2, a cytoplasmic poly(A) polymerase, can be recruited to the target mRNA by an RNA targeting effector protein. This would allow for directed polyadenylation of the target mRNA thereby stimulating translation.

[0319] Similarly, the RNA targeting effector proteins envisaged herein can be used to block translational repressors of mRNA, such as ZBP1 (Huttelmaier 5, et al. Nature. 2005; 438:512-5). By binding to translation initiation site of a target RNA, translation can be directly affected.

[0320] In addition, fusing the RNA targeting effector proteins to a protein that stabilizes mRNAs, e.g. by preventing degradation thereof such as RNase inhibitors, it is possible to increase protein production from the transcripts of interest.

[0321] It is envisaged that the RNA targeting effector proteins described herein can be used to repress translation by binding in the 5′ UTR regions of a RNA transcript and preventing the ribosome from forming and beginning translation.

[0322] Further, the RNA targeting effector protein can be used to recruit Caf1, a component of the CCR4-NOT deadenylase complex, to the target mRNA, resulting in deadenylation or the target transcript and inhibition of protein translation.

[0323] For instance, the RNA targeting effector protein of the invention can be used to increase or decrease translation of therapeutically relevant proteins. Examples of therapeutic applications wherein the RNA targeting effector protein can be used to downregulate or upregulate translation are in amyotrophic lateral sclerosis (ALS) and cardiovascular disorders. Reduced levels of the glial glutamate transporter EAAT2 have been reported in ALS motor cortex and spinal cord, as well as multiple abnormal EAAT2 mRNA transcripts in ALS brain tissue. Loss of the EAAT2 protein and function thought to be the main cause of excitotoxicity in ALS. Restoration of EAAT2 protein levels and function may provide therapeutic benefit. Hence, the RNA targeting effector protein can be beneficially used to upregulate the expression of EAAT2 protein, e.g. by blocking translational repressors or stabilizing mRNA as described above. Apolipoprotein Al is the major protein component of high density lipoprotein (HDL) and ApoA1 and HDL, are generally considered as atheroprotective. It is envisages that the RNA targeting effector protein can be beneficially used to upregulate the expression of ApoA1, e.g. by blocking translational repressors or stabilizing mRNA as described above.

g) mRNA Turnover

[0324] Translation is tightly coupled to mRNA turnover and regulated mRNA stability. Specific proteins have been described to be involved in the stability of transcripts (such as the ELAV/Hu proteins in neurons, Keene J D, 1999, Proc Natl Acad Sci USA. 96:5-7) and. tristetraprolin (TTP). These proteins stabilize target mRNAs by protecting the messages from degradation in the cytoplasm (Peng S S et al., 1988, EMBO J. 17:3461-70).

[0325] It can be envisaged that the RNA-targeting effector proteins of the present invention can be used to interfere with or to promote the activity of proteins acting to stabilize mRNA transcripts, such that mRNA turnover is affected. For instance, recruitment of human TTP to the target RNA using the RNA targeting effector protein would allow for adenylate-uridylate-rich element (AU-rich element) mediated translational repression and target degradation. AU-rich elements are found in the 3′ UM of many mRNAs that code for proto-oncogenes, nuclear transcription factors, and cytokines and promote RNA stability. As another example, the RNA targeting effector protein can be fused to HuR, another mRNA stabilization protein (Hinman MN and Lou H, Cell Mol Life Sci 2008; 65:3168-81), and recruit it to a target transcript to prolong its lifetime or stabilize short-lived mRNA.

[0326] It is further envisaged that the RNA-targeting effector proteins described herein can be used to promote degradation of target transcripts. For instance, m6A methyltransferase can be recruited to the target transcript to localize the transcript to P-bodies leading to degradation of the target.

[0327] As yet another example, an RNA targeting effector protein as described herein can be fused to the non-specific endonuclease domain PilT N-terminus (PIN), to recruit it to a target transcript and allow degradation thereof.

[0328] Patients with paraneoplastic neurological disorder (PND)-associated encephalomyelitis and neuropathy are patients who develop autoantibodies against Hu-proteins in tumors outside of the central nervous system (Szabo A et al. 1991, Cell.;67:325-33 which then cross the blood-brain barrier. It can be envisaged that the RNA-targeting effector proteins of the present invention can be used to interfere with the binding of auto-antibodies to mRNA transcripts.

[0329] Patients with dystrophy type 1 (MU), caused by the expansion of (CUG)n in the 3′ UTR of dystrophia myotonica-protein kinase (DMPK.) gene, are characterized by the accumulation of such transcripts in the nucleus. It is envisaged that the RNA targeting effector proteins of the invention fused with an endonuclease targeted to the (CUG)n repeats could inhibit such accumulation of aberrant transcripts.

h) Interaction with Multi-Functional Proteins

[0330] Some RNA-binding proteins bind to multiple sites on numerous RNAs to function in diverse processes. For instance, the hnRNP A1 protein has been found to bind exonic splicing silencer sequences, antagonizing the splicing factors, associate with telomere ends (thereby stimulating telomere activity) and bind miRNA to facilitate Drosha-mediated processing thereby affecting maturation. It is envisaged that the RNA-binding effector proteins of the present invention can interfere with the binding of RNA-binding proteins at one or more locations.

### i) RNA Folding

[0331] RNA adopts a defined structure in order to perform its biological activities. Transitions in conformation among alternative tertiary structures are critical to most RNA-mediated processes. However, RNA folding can be associated with several problems. For instance, RNA may have a tendency to fold into, and be upheld in, improper alternative conformations and/or the correct tertiary structure may not be sufficiently thermodynamically favored over alternative structures. The RNA targeting effector protein, in particular a cleavage-deficient or dead RNA targeting protein, of the invention may be used to direct folding of (m)RN A and/or capture the correct tertiary structure thereof.

### Use of RNA-Targeting Effector Protein in Modulating Cellular Status

[0332] In certain embodiments C2c2 in a complex with crRNA is activated upon binding to target RNA and subsequently cleaves any nearby snRNA targets e, “collateral” or “bystander” effects). C2c2, once primed by the cognate target, can cleave other (non-complementary) RNA molecules. Such promiscuous RNA cleavage could potentially cause cellular toxicity, or otherwise affect cellular physiology or cell status.

[0333] Accordingly, in certain embodiments, the non-naturally occurring or engineered composition, vector system, or delivery systems as derscribed herein are used for or are for use in induction of cell dormancy. In certain embodiments, the non-naturally occurring or engineered composition, vector system, or delivery systems as derscribed herein are used for or are for use in induction of cell cycle arrest. In certain embodiments, the non-naturally occurring or engineered composition, vector system, or delivery systems as derscribed herein are used for or are for use in reduction of cell growth and/or cell proliferation. In certain embodiments, the non-naturally occurring or engineered composition, vector system, or delivery systems as derscribed herein are used for or are for use in induction of cell anergy. In certain embodiments, the non-naturally occurring or engineered composition, vector system, or delivery systems as derscribed herein are used for or are for use in induction of cell apoptosis. In certain embodiments, the non-naturally occurring or engineered composition, vector system, or delivery systems as derscribed herein are used for or are for use in indiction of cell necrosis. In certain embodiments, the non-naturally occurring or engineered composition, vector system, or delivery systems as derscribed herein are used for or are for use in induction of cell death. In certain embodiments, the non-naturally occurring or engineered composition, vector system, or delivery systems as derscribed herein are used for or are for use in induction of programmed cell death.

[0334] In certain embodiments, the invention relates to a method for induction of cell dormancy comprising introducing or inducing the non-naturally occurring or engineered composition, vector system, or delivery systems as derscribed herein. In certain embodiments, the invention relates to a method for induction of cell cycle arrest comprising introducing or inducing the non-naturally occurring or engineered composition, vector system, or delivery systems as derscribed herein. In certain embodiments, the invention relates to a method for reduction of cell growth and/or cell proliferation comprising introducing or inducing the non-naturally occurring or engineered composition, vector system, or delivery systems as derscribed herein. In certain embodiments, the invention relates to a method for induction of cell anergy comprising introducing or inducing the non-naturally occurring or engineered composition, vector system, or delivery systems as derscribed herein. In certain embodiments, the invention relates to a method for induction of cell apoptosis comprising introducing or inducing the non-naturally occurring or engineered composition, vector system, or delivery systems as derscribed herein. :In certain embodiments, the invention relates to a method for induction of cell necrosis comprising introducing or inducing the non-naturally occurring or engineered composition, vector system, or delivery systems as derscribed herein. In certain embodiments, the invention relates to a method for induction of cell death comprising introducing or inducing the non-naturally occurring or engineered composition, vector system, or delivery systems as derscribed herein. In certain embodiments, the invention relates to a method for induction of programmed cell death comprising introducing or inducing the non-naturally occurring or engineered composition, vector system, or delivery systems as derscribed herein.

[0335] The methods and uses as described herein may be therapeutic or prophylactic and may target particular cells, cell (sub)populations, or cell/tissue types. In particular, the methods and uses as described herein may be therapeutic or prophylactic and may target particular cells, cell (sub)populations, or cell/tissue types expressing one or more target sequences, such as one or more particular target RNA (e.g. ss RNA). Without limitation, target cells may for instance be cancer cells expressing a particular transcript, e.g. neurons of a given class, (immune) cells causing e.g. autoimmunity, or cells infected by a specific (e.g. viral) pathogen, etc.

[0336] Accordingly, in certain embodiments, the invention relates to a method for treating a pathological condition characterized by the presence of undersirable cells (host cells), comprising introducing or inducing the non-naturally occurring or engineered composition, vector system, or delivery systems as derscribed herein. :In certain embodiments, the invention relates the use of the non-naturally occurring or engineered composition, vector system, or delivery systems as derscribed herein for treating a pathological condition characterized by the presence of undersirable cells (host cells). In certain embodiments, the invention relates the non-naturally occurring or engineered composition, vector system, or delivery systems as derscribed herein for use in treating a pathological condition characterized by the presence of undersirable cells (host cells). It is to be understood that preferably the CRISPR-Cas system targets a target specific for the undesirable cells. :In certain embodiments, the invention relates to the use of the non-naturally occurring or engineered composition, vector system, or delivery systems as derscribed herein for treating, preventing, or alleviating cancer. In certain embodiments, the invention relates to the non-naturally occurring or engineered composition, vector system, or delivery systems as derscribed herein for use in treating, preventing, or alleviating cancer. In certain embodiments, the invention relates to a method for treating, preventing, or alleviating cancer comprising introducing or inducing the non-naturally occurring or engineered composition, vector system, or delivery systems as derscribed herein. It is to be understood that preferably the CRISPR-Cas system targets a target specific for the cancer cells. In certain embodiments, the invention relates to the use of the non-naturally occurring or engineered composition, vector system, or delivery systems as derscribed herein for treating, preventing, or alleviating infection of cells by a pathogen. In certain embodiments, the invention relates to the non-naturally occurring or engineered composition, vector system, or delivery systems as derscribed herein for use in treating, preventing, or alleviating infection of cells by a pathogen. In certain embodiments, the invention relates to a method for treating, preventing, or alleviating infection of cells by a pathogen comprising introducing or inducing the non-naturally occurring or engineered composition, vector system, or delivery systems as derscribed herein. It is to be understood that preferably the CRISPR-Cas system targets a target specific for the cells infected by the pathogen (e.g. a pathogen derived target). In certain embodiments, the invention relates to the use of the non-naturally occurring or engineered composition, vector system, or delivery systems as derscribed herein for treating, preventing, or alleviating an autoimmune disorder. In certain embodiments, the invention relates to the non-naturally occurring or engineered composition, vector system, or delivery systems as derscribed herein for use in treating, preventing, or alleviating an autoimmune disorder. In certain embodiments, the invention relates to a method for treating, preventing, or alleviating an autoimmune disorder comprising introducing or inducing the non-naturally occurring or engineered composition, vector system, or delivery systems as derscribed herein. It is to be understood that preferably the CRISPR-Cas system targets a target specific for the cells responsible for the autoimmune disorder (e.g. specific immune cells).

### Use of RNA-Targeting Effector Protein in RNA Detection

[0337] It is further envisaged that the RNA targeting effector protein can be used in Northern blot assays. Northern blotting involves the use of electrophoresis to separate RNA samples by size. The RNA targeting effector protein can be used to specifically bind and detect the target RNA sequence,

[0338] A RNA targeting effector protein can be fused to a fluorescent protein (such as GFP) and used to track RNA localization in living cells. More particularly, the RNA targeting effector protein can be inactivated in that it no longer cleaves RNA. In particular embodiments, it is envisaged that a split RNA targeting effector protein can be used, whereby the signal is dependent on the binding of both subproteins, in order to ensure a more precise visualization. Alternatively, a split fluorescent protein can be used that is reconstituted when multiple RNA targeting effector protein complexes bind to the target transcript. It is further envisaged that a transcript is targeted at multiple binding sites along the mRNA so the fluorescent signal can amplify the true signal and allow for focal identification, As yet another alternative, the fluorescent protein can be reconstituted form a split intein.

[0339] RNA targeting effector proteins are for instance suitably used to determine the localization of the RNA or specific splice variants, the level of mRNA transcript, up- or down-regulation of transcripts and disease-specific diagnosis. The RNA targeting effector proteins can be used for visualization of RNA in (living) cells using e.g. fluorescent microscopy or flow cytometry, such as fluorescence-activated cell sorting (FACS) which allows for high-throughput screening of cells and recovery of living cells following cell sorting. Further, expression levels of different transcripts can be assessed simultaneously under stress, e.g. inhibition of cancer growth using molecular inhibitors or hypoxic conditions on cells. Another application would be to track localization of transcripts to synaptic connections dudng a neural stimulus using two photon microscopy.

[0340] In certain embodiments, the components or complexes according to the invention as described herein can be used in multiplexed error-robust fluorescence in situ hybridization (MERFISH, Chen et al. Science; 2015; 348(6233)), such as for instance with (fluorescently) labeled C2c2 effectors.

### In Vitro Apex Labeling

[0341] Cellular processes depend on a network of molecular interactions among protein, RNA, and DNA. Accurate detection of protein—DNA and protein—RNA interactions is key to understanding such processes. In vitro proximity labeling technology employs an affinity tag combined with e.g. a photoactivatable probe to label polypeptides and RNAs in the vicinity of a protein or RNA of interest in vitro. After UV irradiation the photoactivatable group reacts with proteins and other molecules that are in close proximity to the tagged molecule, thereby labelling them. Labelled interacting molecules can subsequently be recovered and identified. The RNA targeting effector protein of the invention can for instance be used to target a probe to a selected RNA sequence.

[0342] These applications could also be applied in animal models for in vivo imaging of disease relevant applications or difficult-to culture cell types. Use of RNA-targeting effector protein in RNA origami/in vitro assemble lines—combinatorics RNA origami refers to nanoscale folded structures for creating two-dimensional or three-dimensional structures using RNA as integrated template. The folded structure is encoded in the RNA and the shape of the resulting RNA is thus determined by the synthesized RNA sequence (Geary, et al. 2014. Science, 345 (6198). pp. 799-804). The RNA origami may act as scaffold for arranging other components, such as proteins, into complexes. The RNA targeting effector protein of the invention can for instance be used to target proteins of interest to the RNA origami using a suitable guide RNA.

[0343] These applications could also be applied in animal models for iii vivo imaging of disease relevant applications or difficult-to culture cell types.

### Use of RNA-Targeting Effector Protein In Rna Isolation or Purification, Enrichment or Depletion

[0344] It is further envisages that the RNA targeting effector protein when complexed to RNA can be used to isolate and/or purify the RNA. The RNA targeting effector protein can for instance be fused to an affinity tag that can be used to isolate and/or purify the RNA-RNA targeting effector protein complex. Such applications are for instance useful in the analysis of gene expression profiles in cells.

[0345] In particular embodiments, it can be envisaged that the RNA targeting effector proteins can be used to target a specific noncoding RNA (ncRNA) thereby blocking its activity, providing a useful functional probe. in certain embodiments, the effector protein as described herein may be used to specifically enrich for a particular RNA (including but not limited to increasing stability, etc.), or alternatively to specifically deplete a particular RNA (such as without limitation for instance particular splice variants, isoforms, etc.).

Interrogation of lineRNA Function a5nd Other Nuclear RNAs

[0346] Current RNA knockdown strategies such as siRNA have the disadvantage that they are mostly limited to targeting cytosolic transcripts since the protein machinery is cytosolic. The advantage of a RNA targeting effector protein of the present invention, an exogenous system that is not essential to cell function, is that it can be used in any compartment in the cell. By fusing a. NLS signal to the RNA targeting effector protein, it can be guided to the nucleus, allowing nuclear RNAs to be targeted. It is for instance envisaged to probe the function of lincRNAs. Long intergenic non-coding RNAs (lincRNAs) are a vastly underexplored area of research. Most lincRNAs have as of yet unknown functions which could be studies using the RNA targeting effector protein of the invention.

### Identification of RNA Binding Proteins

[0347] Identifying proteins bound to specific RNAs can be useful for understanding the roles of many RNAs. For instance, many lincRNAs associate with transcriptional and epigenetic regulators to control transcription. Understanding what proteins bind to a given lincRNA can help elucidate the components in a given regulatory pathway. A RNA targeting effector protein of the invention can be designed to recruit a biotin ligase to a specific transcript in order to label locally bound proteins with biotin. The proteins can then be pulled down and analyzed by mass spectrometry to identify them.

### Assembly of Complexes on RNA and Substrate Shuttling

[0348] RNA targeting effector proteins of the invention can further be used to assemble complexes on RNA. This can be achieved by functionalizing the RNA targeting effector protein with multiple related proteins (e.g. components of a particular synthesis pathway). Alternatively, multiple RNA targeting effector proteins can be functionalized with such different related proteins and targeted to the same or adjacent target RNA. Useful application of assembling complexes on RNA are for instance facilitating substrate shuttling between proteins.

### Synthetic Biology

[0349] The development of biological systems have a wide utility, including in clinical applications. It is envisaged that the programmable RNA targeting effector proteins of the invention can be used fused to split proteins of toxic domains for targeted cell death, for instance using cancer-linked RNA as target transcript. Further, pathways involving protein-protein interaction can be influenced in synthetic biological systems with e.g. fusion complexes with the appropriate effectors such as kinases or other enzymes.

### Protein Splicing: Inteins

[0350] Protein splicing is a post-translational process in which an intervening polypeptide, referred to as an intein, catalyzes its own excision from the polypeptides finking it, referred to as exteins, as well as subsequent ligation of the exteins. The assembly of two or more RNA targeting effector proteins as described herein on a target transcript could be used to direct the release of a split intein (Topilina and Mills Mob DNA. 2014 Feb. 4; 5(1):5), thereby allowing for direct computation of the existence of a mRNA transcript and subsequent release of a protein product, such as a metabolic enzyme or a transcription factor (for downstream actuation of transcription pathways). This application may have significant relevance in synthetic biology (see above) or large-scale bioproduction (only produce product under certain conditions).

### Inducible, Dosed and Self-Inactivating Systems

[0351] In one embodiment, fusion complexes comprising an RNA targeting effector protein of the invention and an effector component are designed to be inducible, for instance light inducible or chemically inducible. Such inducibility allows for activation of the effector component at a desired moment in time.

[0352] Light inducibility is for instance achieved by designing a fusion complex wherein CRY2PI-IR/CIBN pairing is used for fusion. This system is particularly useful for light induction of protein interactions in living cells (Konermann S, et al. Nature. 2013; 500:472-476).

[0353] Chemical inducibility is for instance provided for by designing a fusion complex wherein FKBP/FRB (FK506 binding protein/FKBP rapamycin binding) pairing is used for fusion. Using this system rapamycin is required for binding of proteins (Zetsche et al. Nat Biotechnol. 2015; 33(2):139-42 describes the use of this system for Cas9)

[0354] Further, when introduced in the cell as DNA, the RNA targeting effector protein of the inventions can be modulated by inducible promoters, such as tetracycline or doxycycline controlled transcriptional activation (Tet-On and Tet-Off expression system), hormone inducible gene expression system such as for instance an ecdysone inducible gene expression system and an arabinose-inducible gene expression system. When delivered as RNA, expression of the RNA targeting effector protein can be modulated via a riboswitch, which can sense a small molecule like tetracycline (as described in Goldfless et al. Nucleic Acids Res. 2012; 40(9):e64).

[0355] In one embodiment, the delivery of the RNA targeting effector protein of the invention can be modulated to change the amount of protein or crRNA in the cell, thereby changing the magnitude of the desired effect or any undesired off-target effects.

[0356] In one embodiment, the RNA targeting effector proteins described herein can be designed to be self-inactivating. When delivered to a cell as RNA, either mRNA or as a replication RNA therapeutic (Wrobleska et al Nat Biotechnol. 2015 August; 33(8): 839-841), they can self-inactivate expression and subsequent effects by destroying the own RNA, thereby reducing residency and potential undesirable effects.

[0357] For further in vivo applications of RNA targeting effector proteins as described herein, reference is made to Mackay J P et al (Nat Struct Mol Biol. 2011 March; 18(3):256-61), Nelles et al (Bioessays. 2015 July; 37(7):732-9) and Abil Z and Zhao H (Mol Biosyst. 2015 October; 11(10):2658-65), which are incorporated herein by reference. In particular, the following applications are envisaged in certain embodiments of the invention, preferably in certain embodiments by using catalytically inactive C2c2: enhancing translation (e.g. C2c2—translation promotion factor fusions (e.g. eIF4 fusions)); repressing translation (e.g. gRNA targeting ribosome binding sites); exon skipping (e.g. gRNAs targeting splice donor and/or acceptor sites); exon inclusion (e.g. gRNA targeting a particular exon splice donor and/or acceptor site to be included or C2c2 fused to or recruiting spliceosome components (e.g. U1 snRNA)); accessing RNA localization (e.g. C2c2—marker fusions (e.g. EGFP fusions)); altering RNA localization (e.g. C2c2—localization signal fusions (e.g. NLS or NES fusions)); RNA degradation (in this case no catalytically inactive C2c2 is to be used if relied on the activity of C2c2, alternatively and for increased specificity, a split C2c2 may be used); inhibition of non-coding RNA function (e.g. miRNA), such as by degradation or binding of gRNA to functional sites (possibly titrating out at specific sites by relocalization by C2c2-signal sequence fusions).

[0358] As described herein before and demonstrated in the Examples, C2c2 function is robust to 5′or 3′ extensions of the crRNA and to extension of the crRNA loop. It is therefore envisages that MS2 loops and other recruitment domains can be added to the crRNA without affecting complex formation and binding to target transcripts. Such modifications to the crRNA for recruitment of various effector domains are applicable in the uses of a RNA targeted effector proteins described above.

[0359] As demonstrated in the Examples, C2c2, in particular LshC2c2, is capable of mediating resistance to RNA phages. It is therefore envisaged that C2c2 can be used to immunize, e.g. animals, humans and plants, against RNA-only pathogens, including but not limited to Ebola virus and Zika virus.

[0360] The present inventors have shown that C2c2 can processes (cleaves) its own array. This applies to both the wildtype C2c2 protein and the mutated C2c2 protein containing one or more mutated amino acid residues R597, H602, R1278 and H1283, such as one or more of the modifications selected from R597A, H602A, R1278A and H1283A. It is therefore envisaged that multiple crRNAs designed for different target transcripts and/or applications can be delivered as a single pre-crRNA or as a single transcript driven by one promotor. Such method of delivery has the advantages that it is substantially more compact, easier to synthesize and easier to delivery in viral systems. Preferably, amino acid numbering as described herein refers to Lsh C2c2 protein. it will be understood that exact amino acid positions may vary for orthologues of Lsh C2c2, which can be adequately determined by protein alignment, as is known in the art, and as described herein elsewhere.

[0361] Aspects of the invention also encompass methods and uses of the compositions and systems described herein in genome engineering, e.g. for altering or manipulating the expression of one or more genes or the one or more gene products, in prokaryotic or eukaryotic cells, in vitro, in vivo or ex vivo.

[0362] In an aspect, the invention provides methods and compositions for modulating, e.g., reducing, expression of a target RNA in cells. in the subject methods, a C2c2 system of the invention is provided that interferes with transcription, stability, and/or translation of an RNA.

[0363] In certain embodiments, an effective amount of C2c2 system is used to cleave RNA or otherwise inhibit RNA expression. In this regard, the system has uses similar to siRNA and shRNA., thus can also be substituted for such methods. The method includes, without limitation, use of a C2c2 system as a substitute for e.g., an interfering ribonucleic acid (such as an siRNA or shRNA) or a transcription template thereof, e.g., a DNA encoding an shRNA. The C2c2 system is introduced into a target cell, by being administered to a mammal that includes the target cell.

[0364] Advantageously, a C2c2 system of the invention is specific. For example, whereas interfering ribonucleic acid (such as an siRNA or shRNA) polynucleotide systems are plagued by design and stability issues and off-target binding, a C2c2 system of the invention can be designed with high specificity.

### Destabilized C2c2

[0365] In certain embodiments, the effector protein (CRISPR enzyme; C2c2) according to the invention as described herein is associated with or fused to a destabilization domain (DD). in some embodiments, the DD is ER50. A corresponding stabilizing ligand for this DD is, in some embodiments, 4HT. As such, in some embodiments, one of the at least one DDs is ER50 and a stabilizing ligand therefor is 4HT or CMP8. In some embodiments, the DD is DHIFR50. A corresponding stabilizing ligand for this DD is, in some embodiments, TMP. As such, in some embodiments, one of the at least one DDs is DHFR50 and a stabilizing ligand therefor is TMP. In some embodiments, the DD is ER50. A corresponding stabilizing ligand for this DD is, in some embodiments, CMP8. CMP8 may therefore be an alternative stabilizing ligand to 4HT in the ER50 system. While it may he possible that CMP8 and 4HT can/should be used in a competitive matter, some cell types may be more susceptible to one or the other of these two ligands, and from this disclosure and the knowledge in the art the skilled person can use CMP8 and/or 4HT.

[0366] In some embodiments, one or two :DDs may be fused to the N-terminal end of the CRISPR enzyme with one or two DDs fused to the C-terminal of the CRISPR enzyme. In some embodiments, the at least two :DDs are associated with the CRISPR enzyme and the DDs are the same DD, i.e. the DDs are homologous. Thus, both (or two or more) of the DDs could he ER50 DDs. This is preferred in some embodiments. Alternatively, both (or two or more) of the DDs could be DHFR50 DDs. This is also preferred in some embodiments. In some embodiments, the at least two DDs are associated with the CRISPR enzyme and the DDs are different DDs, i.e. the DDS are heterologous. Thus, one of the DI)S could be ER50 while one or more of the DDS or any other DDs could be DHFR50. Having two or more DDs which are heterologous may be advantageous as it would provide a greater level of degradation control. A tandem fusion of more than one DD at the N or C-term may enhance degradation; and such a tandem fusion can be, for example ER50-ER50-C2c2 or DHFR-DHFR-C2c2 It is envisaged that high levels of degradation would occur in the absence of either stabilizing ligand, intermediate levels of degradation would occur in the absence of one stabilizing ligand and the presence of the other (or another) stabilizing ligand, while low levels of degradation would occur in the presence of both (or two of more) of the stabilizing ligands. Control may also be imparted by having an N-terminal ER50 DD and a C-terminal DHFR50 DD.

[0367] In some embodiments, the fusion of the CRISPR enzyme with the DD comprises a linker between the DD and the CRISPR enzyme. In some embodiments, the linker is a GlySer linker. in some embodiments, the DD-CRISPR enzyme further comprises at least one Nuclear Export Signal (NES). In some embodiments, the DD-CRISPR enzyme comprises two or more NESs. In some embodiments, the DD-CRISPR enzyme comprises at least one Nuclear Localization Signal (NLS). This may be in addition to an NES. In some embodiments, the CRISPR enzyme comprises or consists essentially of or consists of a localization (nuclear import or export) signal as, or as part of, the linker between the CRISPR enzyme and the DD. HA or Flag tags are also within the ambit of the invention as linkers. Applicants use NLS and/or NES as linker and also use Glycine Serine linkers as short as GS up to (GGGGS)3 (SEQ ID NO: 19).

[0368] Destabilizing domains have general utility to confer instability to a wide range of proteins; see, e.g., Miyazaki, Am Chem Soc. March 7, 2012.; 134(9): 3942-3945, incorporated herein by reference. CMP8 or 4-hydroxytamoxifen can be destabilizing domains. More generally, A temperature-sensitive mutant of mammalian DHFR (DHFRs), a destabilizing residue by the N-end rule, was found to be stable at a permissive temperature but unstable at 37° C. The addition of methotrexate, a high-affinity ligand for mammalian DHFR, to cells expressing DHFRts inhibited degradation of the protein partially. This was an important demonstration that a small molecule ligand can stabilize a protein otherwise targeted for degradation in cells. A rapamycin derivative was used to stabilize an unstable mutant of the FRB domain of mTOR (FRB*) and restore the function of the fused kinase, GSK-3β.6,7 This system demonstrated that ligand-dependent stability represented an attractive strategy to regulate the function of a specific protein in a complex biological environment. A system to control protein activity can involve the DD becoming functional when the ubiquitin complementation occurs by rapamycin induced dimerization of FK506-binding protein and. FKBP12. Mutants of human FKBP12 or ecDHFR protein can be engineered to be metabolically unstable in the absence of their high-affinity ligands, Shield-1 or trimethoprim (TMP), respectively. These mutants are some of the possible destabilizing domains (DDs) useful in the practice of the invention and instability of a DD as a fusion with a CRISPR enzyme confers to the CRISPR protein degradation of the entire fusion protein by the proteasome. Shield-1 and TMP bind to and stabilize the DD in a dose-dependent manner. The estrogen receptor ligand binding domain (ERLBD, residues 305-549 of ERS1) can also be engineered as a destabilizing domain. Since the estrogen receptor signaling pathway is involved in a variety of diseases such as breast cancer, the pathway has been widely studied and numerous agonist and antagonists of estrogen receptor have been developed. Thus, compatible pairs of ERLBD and drugs are known. There are ligands that bind to mutant but not wild-type forms of the ERLBD. By using one of these mutant domains encoding three mutations (L384M, M421G, G521R)12, it is possible to regulate the stability of an ERLBD-derived DD using a ligand that does not perturb endogenous estrogen-sensitive networks. An additional mutation (Y537S) can be introduced to further destabilize the ERLBD and to configure it as a potential DD candidate. This tetra-mutant is an advantageous DD development. The mutant ERLBD can be fused to a CRISPR enzyme and its stability can be regulated or perturbed using a ligand, whereby the CRISPR enzyme has a DD. Another DD can be a 12-kDa (107-amino-acid) tag based on a mutated FKBP protein, stabilized by Shield1. ligand; see, e.g., Nature Methods 5, (2008). For instance a DD can be a modified FK506 binding protein 12 (FKBP12) that binds to and is reversibly stabilized by a synthetic, biologically inert small molecule, Shield-1; see, e.g., Banaszynski L A, Chen L C, Maynard-Smith L A, Ooi A G, Wandless T J. A rapid, reversible, and tunable method to regulate protein function in living cells using synthetic small molecules. Cell. 2006;126:995-1004; Banaszynski L A, Sellmyer M A, Contag C H, Wandless T J, Thorne S H. Chemical control of protein stability and function in living mice. Nat Med. 2008; 14:1123-1127; Maynard-Smith L A, Chen L C, Banaszynski L A, Ooi A G, Wandless T J. A directed approach for engineering conditional protein stability using biologically silent small molecules, The Journal of biological chemistry. 2007; 282:24866-24872; and Rodriguez, Chem Biol. Mar. 23, 2012; 19(3): 391-398—all of which are incorporated herein by reference and may be employed in the practice of the invention in selected a DD to associate with a CRISPR enzyme in the practice of this invention. As can be seen, the knowledge in the art includes a number of DDs, and the DD can be associated with, e.g., fused to, advantageously with a linker, to a CRISPR enzyme, whereby the DD can be stabilized in the presence of a ligand and when there is the absence thereof the DD can become destabilized, whereby the CRISPR enzyme is entirely destabilized, or the DD can be stabilized in the absence of a ligand and when the ligand is present the DD can become destabilized; the DD allows the CRISPR enzyme and hence the CRISPR-Cas complex or system to be regulated or controlled—turned on or off so to speak, to thereby provide means for regulation or control of the system, e.g., in an in vivo or in vitro environment. For instance, when a protein of interest is expressed as a fusion with the DD tag, it is destabilized and rapidly degraded in the cell, e.g., by proteasomes. Thus, absence of stabilizing ligand leads to a D associated Cas being degraded. When a new DD is fused to a protein of interest, its instability is conferred to the protein of interest, resulting in the rapid degradation of the entire fusion protein. Peak activity for Cas is sometimes beneficial to reduce off-target effects. Thus, short bursts of high activity are preferred. The present invention is able to provide such peaks. In some senses the system is inducible. In some other senses, the system repressed in the absence of stabilizing ligand and de-repressed in the presence of stabilizing ligand.

### Application of RNA Targeting—CRLSPR System to Plants and Yeast

### Definitions:

[0369] In general, the term “plant” relates to any various photosynthetic, eukaryotic, unicellular or multicellular organism of the kingdom Plantae characteristically growing by cell division, containing chloroplasts, and having cell walls comprised of cellulose. The term plant encompasses monocotyledonous and dicotyledonous plants. Specifically, the plants are intended to comprise without limitation angiosperm and gymnosperm plants such as acacia, alfalfa, amaranth, apple, apricot, artichoke, ash tree, asparagus, avocado, banana, barley, beans, beet, birch, beech, blackberry, blueberry, broccoli, Brussel's sprouts, cabbage, canola, cantaloupe, carrot, cassava, cauliflower, cedar, a cereal, celery, chestnut, cherry, Chinese cabbage, citrus, clementine, clover, coffee, corn, cotton, cowpea, cucumber, cypress, eggplant, elm, endive, eucalyptus, fennel, figs, fir, geranium, grape, grapefruit, groundnuts, ground cherry, gum hemlock, hickory, kale, kiwifruit, kohlrabi, larch, lettuce, leek, lemon, lime, locust, pine, maidenhair, maize, mango, maple, melon, millet, mushroom, mustard, nuts, oak, oats, oil palm, okra, onion, orange, an ornamental plant or flower or tree, papaya, palm, parsley, parsnip, pea, peach, peanut, pear, peat, pepper, persimmon, pigeon pea, pine, pineapple, plantain, plum, pomegranate, potato, pumpkin, radicchio, radish, rapeseed, raspberry, rice, rye, sorghum, safflower, sallow, soybean, spinach, spruce, squash, strawberry, sugar beet, sugarcane, sunflower, sweet potato, sweet corn, tangerine, tea, tobacco, tomato, trees, triticale, turf grasses, turnips, vine, walnut, watercress, watermelon, wheat, yams, yew, and zucchini. The term plant also encompasses Algae, which are mainly photoautotrophs unified primarily by their lack of roots, leaves and other organs that characterize higher plants.

[0370] The methods for modulating gene expression using the RNA targeting system as described herein can be used to confer desired traits on essentially any plant. A wide variety of plants and plant cell systems may be engineered for the desired physiological and agronomic characteristics described herein using the nucleic acid constructs of the present disclosure and the various transformation methods mentioned above. In preferred embodiments, target plants and plant cells for engineering include, but are not limited to, those monocotyledonous and dicotyledonous plants, such as crops including grain crops (e.g., wheat, maize, rice, millet, barley), fruit crops (e.g., tomato, apple, pear, strawberry, orange), forage crops (e.g., alfalfa), root vegetable crops (e.g., carrot, potato, sugar beets, yam), leafy vegetable crops (e.g., lettuce, spinach); flowering plants (e.g., petunia, rose, chrysanthemum), conifers and pine trees (e.g., pine fir, spruce); plants used in phytoremediation (e.g., heavy metal accumulating plants); oil crops (e.g., sunflower, rape seed) and plants used for experimental purposes (e.g., Arabidopsis), Thus, the methods and CRISPR-Cas systems can be used over a broad range of plants, such as for example with dicotyledonous plants belonging to the orders Magniolales, Illicales, Laurales, Piperales, Aristochiales, Nymphaeales, Ranunculales, Papeverales, Sarraceniaceae, Trochodendrales, Flamamelidales, Eucomiales, Leitneriales, Myricales, Fagales, Casuarinales, Caryophyllales, Fatales, Polygonales, Plumbaginales, Dilleniales, Theales, Malvales, Urticales, Lecythidales, Violates, Salicales, Capparales, Ericales, Diapensales, Ebenales, Primulales, Rosales, Fabales, Podostemales, Haloragales, Myrtales, Cornales, Proteales, San tales, Rafflesiales, Celastrales, Euphorbiales, Rhamnales, Sapindales, Juglandales, Geraniales, Polygalales, Umbellales, Gentianales, Polemoniales, Lamiales, Plantaginales, Scrophulariales, Campanulales, Rubiales, Dipsacales, and Asterales; the methods and CRISPR-Cas systems can be used with monocotyledonous plants such as those belonging to the orders Alismatales, Hydrocharitales, Najadales, Triuridales, Commelinales, Eriocaulales, Restionales, Poales, Juncales, Cyperales, Typhales, Brorneliales, Zingiberales, Arecales, Cyclanthales, Pandanales, Arales, Lilliales, and Orchid ales, or with plants belonging to Gymnospermae, e.g those belonging to the orders Pinales, Ginkgoales, Cycadales, Araucariales, Cupressales and Gnetales.

[0371] The RNA targeting CRISPR systems and methods of use described herein can be used over a broad range of plant species, included in the non-limitative list of dicot, monocot or gymnosperm genera hereunder: Atropa, Alseodaphne, Anacardium, Arachis, Beilschmiedia, Brassica, Carthamus, Cocculus, Croton, Cucumis, Citrus, Citrullus, Capsicum, Catharanthus, Cocos, Coffea, Cucurbita, Daucus, Duguetia, Eschscholzia, Ficus, Fragaria, Glaucium, Glycine, Gossypium, Helianthus, Hevea, Hyoscyanus, Lactuca, Landolphia, Linum, Litsea, Lycopersicon, Lupinus, Manihot, Majorana, Malus, Medicago, Nicotiana, Olea, Parthenium, Papaver, Persea, Phaseolus, Pistacia, Pisum, Pyrus, Prunus, Raphanus, Ricinus, Senecio, Sinomenium, Stephania, Sinapis, Solanum, Theobroma, Trifolium, Trigonella, Victa, Vinca, Villis, and Vigna; and the genera Allium, Andropogon, Aragrostis, Asparagus, Avena, Cynodon, Elaeis, Festuca, Festulolium, Heterocallis, Hordeum, Lemna, Loluim, Musa, Oryza, Panicum, Pannesetum, Phleum, Poa, Secale, Sorghum, Triticum, Zea, Abies, Cunninghamia, Ephedra, Picea, Pinus, and Pseudotsuga.

[0372] The RNA targeting CRISPR systems and methods of use can also be used over a broad range of “algae” or “algae cells”; including for example algea selected from several eukaryotic phyla, including the Rhodophyta (red algae), Chlorophyta (green algae), Phaeophyta (brown algae), Bacillariophyta (diatoms), Eustigmatophyta and dinoflagellates as well as the prokaryotic phylum Cyanobacteria (blue-green. algae). The term “algae” includes for example algae selected from: Amphora, Anabaena, Anikstrodesmis, Botryococcus, Chaetoceros, Chlamydomonas, Chlorella, Chlorococcum, Cyclotella, Cylindrothera, Dunaliella, Emiliana, Euglena, Hematococcus, Isochrysis, Monochrysis, Monoraphidium, Nannochloris, Nannnochloropsis, Navicula, Nephrochloris, Nephroselmis, Nitzschia, Nodularia, Nostoc, Oochromonas, Oocystis, Oscillartoria, Pavlova, Phaeodactylum, Playtmonas, Pleurochrysis, Porhyra, Pseudoanabaena, Pyramimonas, Stichococcus, Synechococcus, Synechocystis, Tetraselmis, Thalassiosira, and Trichodesmium.

[0373] A part of a plant, i.e., a “plant tissue” may be treated according to the methods of the present invention to produce an improved plant. Plant tissue also encompasses plant cells.The term “plant cell” as used herein refers to individual units of a living plant, either in an intact whole plant or in an isolated form grown in in vitro tissue cultures, on media or agar, in suspension in a growth media or buffer or as a part of higher organized unites, such as, for example, plant tissue, a plant organ, or a whole plant.

[0374] A “protoplast” refers to a plant cell that has had its protective cell wall completely or partially removed using, for example, mechanical or enzymatic means resulting in an intact biochemical competent unit of living plant that can reform their cell wall, proliferate and regenerate grow into a whole plant under proper growing conditions.

[0375] The term “transformation” broadly refers to the process by which a plant host is genetically modified by the introduction of DNA by means of Agrobacteria or one of a variety of chemical or physical methods. As used herein, the term “plant host” refers to plants, including any cells, tissues, organs, or progeny of the plants. Many suitable plant tissues or plant cells can be transformed and include, but are not limited to, protoplasts, somatic embryos, pollen, leaves, seedlings, stems, calli, stolons, microtubers, and shoots. A plant tissue also refers to any clone of such a plant, seed, progeny, propagule whether generated sexually or asexually, and descendents of any of these, such as cuttings or seed.

[0376] The term “transformed” as used herein, refers to a cell, tissue, organ, or organism into which a foreign DNA molecule, such as a construct, has been introduced. The introduced DNA molecule may be integrated into the genomic DNA of the recipient cell, tissue, organ, or organism such that the introduced DNA molecule is transmitted to the subsequent progeny. in these embodiments, the “transformed” or “transgenic” cell or plant may also include progeny of the cell or plant and progeny produced from a breeding program employing such a transformed plant as a parent in a cross and exhibiting an altered phenotype resulting from the presence of the introduced DNA molecule. Preferably, the transgenic plant is fertile and capable of transmitting the introduced DNA to progeny through sexual reproduction.

[0377] The term “progeny”, such as the progeny of a transgenic plant, is one that is born of, begotten by, or derived from a plant or the transgenic plant. The introduced DNA molecule may also be transiently introduced into the recipient cell such that the introduced DNA molecule is not inherited by subsequent progeny and thus not considered “transgenic”. Accordingly, as used herein, a “non-transgenic” plant or plant cell is a plant which does not contain a foreign DNA stably integrated into its genome.

[0378] The term “plant promoter” as used herein is a promoter capable of initiating transcription in plant cells, whether or not its origin is a plant cell. Exemplary suitable plant promoters include, but are not limited to, those that are obtained from plants, plant viruses, and bacteria such as Agrobacterium or Rhizobium which comprise genes expressed in plant cells.

[0379] As used herein, a “fungal cell” refers to any type of eukaryotic cell within the kingdom of fungi. Phyla within the kingdom of fungi include Ascomycota, Basidiomycota, Blastocladiomycota, Chytridiomycota, Glomeromycota, Microsporidia, and Neocallimastigomycota. Fungal cells may include yeasts, molds, and filamentous fungi. In some embodiments, the fungal cell is a yeast cell.

[0380] As used herein, the term “yeast cell” refers to any fungal cell within the phyla Ascomycota and Basidiomycota. Yeast cells may include budding yeast cells, fission yeast cells, and mold cells. Without being limited to these organisms, many types of yeast used in laboratory and industrial settings are part of the phylum Ascomycota. In some embodiments, the yeast cell is an S. cerervisiae, Kluyveromyces marxianus, or Issatchenkia orientalis cell. Other yeast cells may include without limitation Candida spp. (e.g., Candida albicans), Yarrowia spp. (e.g., Yarrowia lipolytica), Pichia spp. (e.g., Pichia pastoris), Kluyveromyces spp. (e.g., Kluyveromyces lactis and Kluyveromyces marxianus), Neurospora spp. (e.g., Neurospora crassa), Fusarium spp. (e.g., Fusarium oxysporum), and Issatchenkia spp. (e.g., Issatchenkia orientalis, a.k.a. Pichia kudriavzevii and Candida acidothermophilum). In some embodiments, the fungal cell is a filamentous fungal cell. As used herein, the term “filamentous fungal cell” refers to any type of fungal cell that grows in filaments, i.e., hyphae or mycelia. Examples of filamentous fungal cells may include without limitation Aspergillus spp. (e.g., Aspergillus niger), Trichoderma spp. (e.g., Trichoderma reesei), Rhizopus spp. (e.g., Rhizopus oryzae), and Mortierella spp. (e.g., Mortierella isabellina).

[0381] In some embodiments, the fungal cell is an industrial strain. As used herein, “industrial strain” refers to any strain of fungal cell used in or isolated from an industrial process, e.g., production of a product on a commercial or industrial scale. Industrial strain may refer to a fungal species that is typically used in an industrial process, or it may refer to an isolate of a fungal species that may be also used for non-industrial purposes (e.g., laboratory research). Examples of industrial processes may include fermentation (e.g., in production of food or beverage products), distillation, biofuel production, production of a compound, and production of a polypeptide. Examples of industrial strains may include, without limitation, JAY270 and ATCC4124.

[0382] In some embodiments, the fungal cell is a polyploid cell. As used herein, a “polyploid” cell may refer to any cell whose genome is present in more than one copy. A polyploid cell may refer to a type of cell that is naturally found in a polyploid state, or it may refer to a cell that has been induced to exist in a polyploid state (e.g., through specific regulation, alteration, inactivation, activation, or modification of meiosis, cytokinesis, or DNA replication). A polyploid cell may refer to a cell whose entire genome is polyploid, or it may refer to a cell that is polyploid in a particular genomic locus of interest. Without wishing to be bound to theory, it is thought that the abundance of guideRNA. may more often be a rate-limiting component in genome engineering of polyploid cells than in haploid cells, and thus the methods using the C2c2 CR1SPRS system described herein may take advantage of using a certain fungal cell type.

[0383] In some embodiments, the fungal cell is a diploid cell. As used herein, a “diploid” cell may refer to any cell whose genome is present in two copies. A diploid cell may refer to a type of cell that is naturally found in a diploid state, or it may refer to a cell that has been induced to exist in a diploid state (e.g,, through specific regulation, alteration, inactivation, activation, or modification of meiosis, cytokinesis, or DNA replication). For example, the S. cerevisiae strain S228C may be maintained in a haploid or diploid state. A diploid cell may refer to a cell whose entire genome is diploid, or it may refer to a cell that is diploid in a particular genomic locus of interest. In some embodiments, the fungal cell is a haploid cell. As used herein, a “haploid” cell may refer to any cell whose genome is present in one copy. A haploid cell may refer to a type of cell that is naturally found in a haploid state, or it may refer to a cell that has been induced to exist in a haploid state (e.g., through specific regulation, alteration, inactivation, activation, or modification of meiosis, cytokinesis, or DNA replication). For example, the S. cerevisiae strain S228C may be maintained in a haploid or diploid state. A haploid cell may refer to a cell whose entire genome is haploid, or it may refer to a cell that is haploid in a particular genomic locus of interest.

[0384] As used herein, a “yeast expression vector” refers to a nucleic acid that contains one or more sequences encoding an RNA and/or polypeptide and may further contain any desired elements that control the expression of the nucleic acid(s), as well as any elements that enable the replication and maintenance of the expression vector inside the yeast cell. Many suitable yeast expression vectors and features thereof are known in the art; for example, various vectors and techniques are illustrated in in Yeast Protocols, 2nd edition, Xiao, W., ed. (Humana Press, New York, 2007) and Buckholz, R. G. and Gleeson, M. A, (1991) Biotechnology (NY) 9(11): 1067-72. Yeast vectors may contain, without limitation, a centromeric (CEN) sequence, an autonomous replication sequence (ARS), a promoter, such as an RNA Polymerase III promoter, operably linked to a sequence or gene of interest, a terminator such as an RNA polymerase III terminator, an origin of replication, and a marker gene (e.g., auxotrophic, antibiotic, or other selectable markers). Examples of expression vectors for use in yeast may include plasmids, yeast artificial chromosomes, 2μ plasmids, yeast integrative plasmids, yeast replicative plasmids, shuttle vectors, and episomal plasmids.

Stable Integration of RNA targeting CRISP System Components in the Genome of Plants and Plant Cells

[0385] In particular embodiments, it is envisaged that the polynucleotides encoding the components of the RNA targeting CRISPR system are introduced for stable integration into the genome of a plant cell. In these embodiments, the design of the transformation vector or the expression system can be adjusted depending on when, where and under what conditions the guide RNA and/or the RNA targeting gene(s) are expressed.

[0386] In particular embodiments, it is envisaged to introduce the components of the RNA targeting CRISPR system stably into the genomic DNA of a plant cell. Additionally or alternatively, it is envisaged to introduce the components of the RNA targeting CRISPR system for stable integration into the DNA of a plant organelle such as, but not limited to a plastid, e mitochondrion or a chloroplast.

[0387] The expression system for stable integration into the genome of a plant cell may contain one or more of the following elements: a promoter element that can be used to express the guide RNA and/or RNA targeting enzyme in a plant cell; a 5′ untranslated region to enhance expression ; an intron element to further enhance expression in certain cells, such as monocot cells; a multiple-cloning site to provide convenient restriction sites for inserting the one or more guide RNAs and/or the RNA targeting gene sequences and other desired elements; and a 3′ untranslated region to provide for efficient termination of the expressed transcript.

[0388] The elements of the expression system may be on one or more expression constructs which are either circular such as a plasmid or transformation vector, or non-circular such as linear double stranded DNA,

[0389] In a particular embodiment, a RNA targeting CRISPR expression system comprises at least:
[0390] (a) a nucleotide sequence encoding a guide RNA (gRNA) that hybridizes with a target sequence in a plant, and wherein the guide RNA comprises a guide sequence and a direct repeat sequence, and
[0391] (b) a nucleotide sequence encoding a RNA targeting protein, wherein components (a) or (b) are located on the same or on different constructs, and whereby the different nucleotide sequences can be under control of the same or a different regulatory element operable in a plant cell.

[0392] DNA construct(s) containing the components of the RNA targeting CRISPR. system, and, where applicable, template sequence may be introduced into the genome of a plant, plant part, or plant cell by a variety of conventional techniques. The process generally comprises the steps of selecting a suitable host cell or host tissue, introducing the construct(s) into the host cell or host tissue, and regenerating plant cells or plants therefrom.

[0393] In particular embodiments, the DNA construct may be introduced into the plant cell using techniques such as but not limited to electroporation, microinjection, aerosol beam injection of plant cell protoplasts, or the DNA constructs can be introduced directly to plant tissue using biolistic methods, such as DNA particle bombardment (see also Fu et al., Transgenic Res, 2000 February; 9(1):11-9). The basis of particle bombardment is the acceleration of particles coated with gene/s of interest toward cells, resulting in the penetration of the protoplasm by the particles and typically stable integration into the genome. (see e.g. Klein et al, Nature (1987), Klein et ah, Bio/Technology (1992), Casas et ah, Proc. Natl. Acad. Sci. USA (1993).).

[0394] In particular embodiments, the DNA constructs containing components of the RNA targeting CRISPR system may be introduced into the plant by Agrobacierium-mediated transformation. The DNA constructs may be combined with suitable ‘1’-DNA flanking regions and introduced into a conventional Agrobacterium tumefciens host vector. The foreign DNA can be incorporated into the genome of plants by infecting the plants or by incubating plant protoplasts with Agrobacterium bacteria, containing one or more Ti (tumor-inducing) plasmids. (see e.g. Fraley et al., (1985), Rogers et al., (1987) and U.S. Pat. No. 5,563,055).

### Plant Promoters

[0395] In order to ensure appropriate expression in a plant cell, the components of the C2c2 CRISPR system described herein are typically placed under control of a plant promoter, i.e. a promoter operable in plant cells. The use of different types of promoters is envisaged.

[0396] A constitutive plant promoter is a promoter that is able to express the open reading frame (ORF) that it controls in all or nearly all of the plant tissues during all or nearly all developmental stages of the plant (referred to as “constitutive expression”). One non-limiting example of a constitutive promoter is the cauliflower mosaic virus 35S promoter. The present invention envisages methods for modifying RNA sequences and as such also envisages regulating expression of plant biomolecules. In particular embodiments of the present invention it is thus advantageous to place one or more elements of the RNA targeting CRISPR system under the control of a promoter that can be regulated.“Regulated promoter” refers to promoters that direct gene expression not constitutively, but in a temporally- and/or spatially-regulated manner, and includes tissue-specific, tissue-preferred and inducible promoters. Different promoters may direct the expression of a gene in different tissues or cell types, or at different stages of development, or in response to different environmental conditions. In particular embodiments, one or more of the RNA targeting CRISPR components are expressed under the control of a constitutive promoter, such as the cauliflower mosaic virus 355 promoter issue-preferred promoters can be utiliz.ed to target enhanced expression in certain cell types within a particular plant tissue, for instance vascular cells in leaves or roots or in specific cells of the seed. Examples of particular promoters for use in the RNA targeting CRISPR system-are found in Kawama.ta et al., (199.7) Plant Cell Physiol 38:792-803; Yamamoto et al., (1997) Plant J 12:255-65; Hire et al, (1992) Plant Mol Biol 20:207-18,Kuster et al, (1995) Plant Mol Biol 29:759-72, and Capana et al., (1994) Plant Mol Biol 25:681 -91.

[0397] Examples of promoters that are inducible and that allow for spatiotemporal control of gene editing or gene expression may use a form of energy. The form of energy may include but is not limited to sound energy, electromagnetic radiation, chemical energy and/or thermal energy. Examples of inducible systems include tetracycline inducible promoters (Tet-On or Tet-Off), small molecule two-hybrid transcription activations systems (FKBP, ABA, etc), or light inducible systems (Phytochrome, LOV domains, or cryptochrome)., such as a Light Inducible Transcriptional Effector (LITE) that direct changes in transcriptional activity in a sequence-specific manner. The components of a light inducible system may include a RNA targeting CRISPR enzyme, a light-responsive cytochrome heterodimer (e.g. from Arabidopsis thaliana), and a transcriptional activation/repression domain. Further examples of inducible DNA binding proteins and methods for their use are provided in U.S. 61/736465 and U.S. 61/721,283, which is hereby incorporated by reference in its entirety.

[0398] In particular embodiments, transient or inducible expression can be achieved by using, for example, chemical-regulated promoters, i.e. whereby the application of an exogenous chemical induces gene expression. Modulating of gene expression can also be obtained by a chemical-repressible promoter, where application of the chemical represses gene expression. Chemical-inducible promoters include, but are not limited to, the maize ln2-2 promoter, activated by benzene sulfonamide herbicide safeners (De Veylder et al., (1997) Plant Cell Physiol 38:568-7), the maize (1ST promoter (GST-11-27, WO93/01294), activated by hydrophobic electrophilic compounds used as pre-emergent herbicides, and the tobacco PR-1 a promoter (Ono et al., (2004) Biosci Biotechnol Biochem 68:803-7) activated by salicylic acid. Promoters which are regulated by antibiotics, such as tetracycline-inducible and tetracycline-repressible promoters (Gatz el al., (1991) Mol Gen Genet 227:229-37; U.S. Pat. Nos. 5,814,618 and 5,789,156) can also be used herein.

Translocation to and/or Expression in Specific Plant Organelles

[0399] The expression system may comprise elements for translocation to and/or expression in a specific plant organelle.

### Chloroplast Targeting

[0400] In particular embodiments, it is envisaged that the RNA targeting CRISPR system is used to specifically modify expression and/or translation of chloroplast genes or to ensure expression in the chloroplast. For this purpose use is made of chloroplast transformation methods or compartimentalization of the RNA targeting CRISPR components to the chloroplast. For instance, the introduction of genetic modifications in the plastid genome can reduce biosafety issues such as gene flow through pollen.

[0401] Methods of chloroplast transformation are known in the art and include Particle bombardment, PEG treatment, and microinjection. Additionally, methods involving the translocation of transformation cassettes from the nuclear genome to the plastid can be used as described in WO2010061186.

[0402] Alternatively, it is envisaged to target one or more of the RNA targeting CRISPR components to the plant chloroplast. This is achieved by incorporating in the expression construct a sequence encoding a chloroplast transit peptide (CTP) or plastid transit peptide, operably linked to the 5′ region of the sequence encoding the RNA targeting protein. The CTP is removed in a processing step during translocation into the chloroplast. Chloroplast targeting of expressed proteins is well known to the skilled artisan (see for instance Protein Transport into Chloroplasts, 2010, Annual Review of Plant Biology,Vol. 61: 157-180). In such embodiments it is also desired to target the one or more guide RNAs to the plant chloroplast. Methods and constructs which can be used for translocating guide RNA into the chloroplast by means of a chloroplast localization sequence are described, for instance, in US 20040142476, incorporated herein by reference. Such variations of constructs can be incorporated into the expression systems of the invention to efficiently translocate the RNA targeting -guide RNA(s).

### Introduction of Polynucleotides Encoding the CRISPR-RNA Targeting System in Algal Cells.

[0403] Transgenic algae (or other plants such as rape) may be particularly useful in the production of vegetable oils or biofuels such as alcohols (especially methanol and ethanol) or other products. These may be engineered to express or overexpress high levels of oil or alcohols for use in the oil or biofuel industries.

[0404] U.S. Pat. No. 8,945,839 describes a method for engineering Micro-Algae (Chlamydomonas reinhardtii cells) species) using Cas9. Using similar tools, the methods of the RNA targeting CRISPR system described herein can be applied on Chlamydomonas species and other algae. In particular embodiments, RNA targeting protein and guide RNA(s) are introduced in algae expressed using a vector that expresses RNA targeting protein under the control of a constitutive promoter such as Hsp70A-Rbc S2 or Beta2 -tubulin. Guide RNA is optionally delivered using a vector containing T7 promoter. Alternatively, RNA targeting mRNA and in vitro transcribed guide RNA can be delivered to algal cells. Electroporation protocols are available to the skilled person such as the standard recommended protocol from the GeneArt Chlamydomonas Engineering kit.

### Introduction of Polynucleotides Encoding RNA Targeting Components in Yeast Cells

[0405] In particular embodiments, the invention relates to the use of the RNA targeting CRISPR system for RNA editing in yeast cells. Methods for transforming yeast cells which can be used to introduce polynucleotides encoding the RNA targeting CRISPR system components are well known to the artisan and are reviewed by Kawai et al., 2010, Bioeng Bugs. 2010 November-December; 1(6): 395-403). Non-limiting examples include transformation of yeast cells by lithium acetate treatment (which may further include carrier DNA and PEG treatment), bombardment or by electroporation.

### Transient Expression of RNA Targeting CRISP System Components in Plants and Plant Cell

[0406] In particular embodiments, it is envisaged that the guide RNA and/or RNA targeting gene are transiently expressed in the plant cell. In these embodiments, the RNA targeting CRISPR system can ensure modification of RNA target molecules only when both the guide RNA and the RNA targeting protein is present in a cell, such that gene expression can further be controlled. As the expression of the RNA targeting enzyme is transient, plants regenerated. from such plant cells typically contain no foreign DNA. in particular embodiments the RNA targeting enzyme is stably expressed by the plant cell and the guide sequence is transiently expressed.

[0407] In particularly preferred embodiments, the RNA targeting CRISPR system components can be introduced in the plant cells using a plant viral vector (Scholthof et al. 1996, Annu Rev Phytopathol. 1996;34:299-323). In further particular embodiments, said viral vector is a vector from a DNA virus. For example, geminivirus (e.g., cabbage leaf curl virus, bean yellow dwarf virus, wheat dwarf virus, tomato leaf curl virus, maize streak virus, tobacco leaf curl virus, or tomato golden mosaic virus) or nanovirus Faba bean necrotic yellow virus). in other particular embodiments, said viral vector is a vector from an RNA virus. For example, tobravirus (e.g., tobacco rattle virus, tobacco mosaic virus), potexvirus (e.g., potato virus X), or hordeivirus (e.g., barley stripe mosaic virus). The replicating genomes of plant viruses are non-integrative vectors, which is of interest in the context of avoiding the production of GMO plants.

[0408] In particular embodiments, the vector used for transient expression of RNA targeting CRISPR constructs is for instance a pEAQ vector, which is tailored for Agrobacterium-mediated transient expression (Sainsbury F. et al., Plant Biotechnol J. 2009 September; 7(7)1682-93) in the protoplast. Precise targeting of genomic locations was demonstrated using a modified Cabbage Leaf Curl virus (CaLCuV) vector to express gRNAs in stable transgenic plants expressing a. CRISPR enzyme (Scientific Reports 5, Article number: 14926 (2015), doi:10.1038/srep14926).

[0409] In particular embodiments, double-stranded DNA fragments encoding the guide RNA and/or the RNA targeting gene can be transiently introduced into the plant cell. In such embodiments, the introduced double-stranded. DNA fragments are provided in sufficient quantity to modify RNA molecule(s) in the cell but do not persist after a contemplated period of time has passed or after one or more cell divisions. Methods for direct DNA transfer in plants are known by the skilled artisan (see for instance Davey et al. Plant Mol Biol. 1989 September; 13(3):273-85.)

[0410] In other embodiments, an RNA polynucleotide encoding the RNA targeting protein is introduced into the plant cell, which is then translated and processed by the host cell generating the protein in sufficient quantity to modify the RNA molecule(s) cell (in the presence of at least one guide RNA) but which does not persist after a contemplated period of time has passed or after one or more cell divisions. Methods for introducing mRNA to plant protoplasts for transient expression are known by the skilled artisan (see for instance in Gallie, Plant Cell Reports (1993), 13;119-122). Combinations of the different methods described above are also envisaged.

### Delivery of RNA Targeting CRISPR Components to the Plant Cell

[0411] In particular embodiments, it is of interest to deliver one or more components of the RNA targeting CRISPR system directly to the plant cell. This is of interest, inter alia, for the generation of non-transgenic plants below). In particular embodiments, one or more of the RNA targeting components is prepared outside the plant or plant cell and delivered to the cell. For instance in particular embodiments, the RNA targeting protein is prepared in vitro prior to introduction to the plant cell. RNA targeting protein can be prepared by various methods known by one of skill in the art and include recombinant production. After expression, the RNA targeting protein is isolated, refolded if needed, purified and optionally treated to remove any purification tags, such as a His-tag. Once crude, partially purified, or more completely purified RNA targeting protein is obtained, the protein may be introduced to the plant cell.

[0412] In particular embodiments, the RNA targeting protein is mixed with guide RNA targeting the RNA of interest to form a pre-assembled ribonucleoprotein.

[0413] The individual components or pre-assembled ribonucleoprotein can be introduced into the plant cell via electroporation, by bombardment with RNA targeting-associated gene product coated particles, by chemical transfection or by some other means of transport across a cell membrane, For instance, transfection of a plant protoplast with a pre-assembled CRISPR ribonucleoprotein has been demonstrated to ensure targeted modification of the plant genome (as described by Woo et al. Nature Biotechnology, 2015; DOI: 10.1038/nbt.3389). These methods can be modified to achieve targeted modification of RNA molecules in the plants.

[0414] In particular embodiments, the RNA targeting CRISPR system components are introduced into the plant cells using nanoparticles, The components, either as protein or nucleic acid or in a combination thereof, can be uploaded onto or packaged in nanoparticles and applied to the plants (such as for instance described in WO 2008042156 and US 20130185823). In particular, embodiments of the invention comprise nanoparticles uploaded with or packed with DNA molecule(s) encoding the RNA targeting protein, DNA molecules encoding the guide RNA and/or isolated guide RNA as described in WO2015089419.

[0415] Further means of introducing one or more components of the RNA targeting CRISPR system to the plant cell is by using cell penetrating peptides (CPP). Accordingly, in particular, embodiments the invention comprises compositions comprising a cell penetrating peptide linked to an RNA targeting protein. In particular embodiments of the present invention, an RNA targeting protein and/or guide RNA(s) is coupled to one or more CPPs to effectively transport them inside plant protoplasts (Ramakrishna (2014, Genome Res. 2014 June; 24(6):1020-7 for Cas9 in human cells). In other embodiments, the RNA targeting gene and/or guide RNA(s) are encoded by one or more circular or non-circular DNA molecule(s) which are coupled to one or more CPPs for plant protoplast delivery. The plant protoplasts are then regenerated to plant cells and further to plants. CPPs are generally described as short peptides of fewer than 35 amino acids either derived from proteins or from chimeric sequences which are capable of transporting biomolecules across cell membrane in a receptor independent manner. CPP can be cationic peptides, peptides having hydrophobic sequences, amphipatic peptides, peptides having proline-rich and anti-microbial sequence, and chimeric or bipartite peptides (Pooga and Langel 2005). CPPs are able to penetrate biological membranes and as such trigger the movement of various biomolecules across cell membranes into the cytoplasm and to improve their intracellular routing, and hence facilitate interaction of the biolomolecule with the target. Examples of CPP include amongst others: Tat, a nuclear transcriptional activator protein required for viral replication by HIV typel, penetratin, Kaposi fibroblast growth factor (FGF) signal peptide sequence, integrin β3 signal peptide sequence; polyarginine peptide Args sequence, Guanine rich-molecular transporters, sweet arrow peptide, etc . . . .

### Target RNA Envisaged for Plant, Algae or Fungal Applications

[0416] The target RNA, i.e. the RNA of interest, is the RNA to be targeted by the present invention leading to the recruitment to, and the binding of the RNA targeting protein at, the target site of interest on the target RNA. The target RNA may be any suitable form of RNA. This may include, in some embodiments, mRNA. In other embodiments, the target RNA may include transfer RNA (tRNA) or ribosomal. RNA (rRNA). In other embodiments the target RNA may include interfering RNA (RNAi), microRNA (miRNA), microswitches, microzymes, satellite RNAs and RNA viruses. The target RNA may be located in the cytoplasm of the plant cell, or in the cell nucleus or in a plant cell organelle such as a mitochondrion, chloroplast or plastid.

[0417] In particular embodiments, the RNA targeting CRISPR system is used to cleave RNA or otherwise inhibit RNA expression.

### Use of RNA Targeting CRISPR System for Modulating Plant Gene Expression Via RNA Modulation

[0418] The RNA targeting protein may also he used, together with a suitable guide RNA, to target gene expression, via control of RNA processing. The control of RNA processing may include RNA processing reactions such as RNA splicing, including alternative splicing; viral replication (in particular of plant viruses, including virioids in plants and tRNA biosynthesis. The RNA targeting protein in combination with a suitable guide RNA may also be used to control RNA activation (RNAa). RNAa leads to the promotion of gene expression, so control of gene expression may be achieved that ^{way,} through disruption or reduction of RNAa and thus less promotion of gene expression.

[0419] The RNA targeting effector protein of the invention can further be used for antiviral activity in plants, in particular against RNA viruses. The effector protein can be targeted to the viral RNA using a suitable guide RNA selective for a selected viral RNA sequence. In particular, the effector protein may be an active nuclease that cleaves RNA, such as single stranded RNA. provided is therefore the use of an RNA targeting effector protein of the invention as an antiviral agent. Examples of viruses that can be counteracted in this way include, but are not limited to, Tobacco mosaic virus (TMV), Tomato spotted wilt virus (TSWV), Cucumber mosaic virus (CMV), Potato virus Y (PVY), Cauliflower mosaic virus (CaMV) (RT virus), Plum pox virus (PPV), Brome mosaic virus (BWV) and Potato virus (PVX).

[0420] Examples of modulating RNA expression in plants, algae or fungi, as an alternative of targeted gene modification are described herein further.

[0421] Of particular interest is the regulated control of gene expression through regulated cleavage of mRNA. This can be achieved by placing elements of the RNA targeting under the control of regulated promoters as described herein.

Use of the RNA targeting CRISPR System to Restore the Functionality of tRNA Molecules.

[0422] Pring et al describe RNA editing in plant mitochondria and chloroplasts that alters mRNA sequences to code for different proteins than the DNA. (Plant Mol. Biol. (1993) 21 (6): 1163-1170. doi:10.1007/BF00023611). In particular embodiments of the invention, the elements of the RNA targeting CRISPR system specifically targetting mitochondrial and chloroplast mRNA can be introduced in a plant or plant cell to express different proteins in such plant cell organelles mimicking the processes occuring in vivo

### Use of the RNA Targeting CRISPR System as an Alternative to RNA Interference to Inhibit RNA Expression.

[0423] The RNA targeting CRISPR system has uses similar to RNA inhibition or RNA interference, thus can also be substituted for such methods. In particular embodiment, the methods of the present invention include the use of the RNA targeting CRISPR as a substitute for e.g. an interfering ribonucleic acid (such as an siRNA or shRNA or a dsRNA). Examples of inhibition of RNA expression in plants, algae or fungi as an alternative of targeted gene modification are described herein further.

### Use of the RNA Targeting CRISPR System to Control RNA Interference.

[0424] Control over interfering RNA or miRNA. may help reduce off-target effects (OTE) seen with those approaches by reducing the longevity of the interfering RNA or miRNA in vivo or in vitro. In particular embodiments, the target RNA may include interfering RNA, i.e. RNA involved in an RNA interference pathway, such as shRNA, siRNA and so forth. In other embodiments, the target RNA may include microRNA. (miRNA) or double stranded RNA (dsRNA).

[0425] In other particular embodiments, if the RNA targeting protein and suitable guide RNA(s) are selectively expressed (for example spatially or temporally under the control of a regulated promoter, for example a tissue- or cell cycle-specific:promoter and/or enhancer) this can be used to ‘protect’ the cells or systems (in vivo or in vitro) from RNAi in those cells. This may be useful in neighbouring tissues or cells where RNAi is not required or for the purposes of comparison of the cells or tissues where the effector protein and suitable guide are and are not expressed (i.e. where the RNAi is not controlled and where it is, respectively). The RNA targeting protein may be used to control or bind to molecules comprising or consisting of RNA, such as ribozymes, ribosomes or riboswitches. In embodiments of the invention, the guide RNA can recruit the RNA targeting protein to these molecules so that the RNA targeting protein is able to bind to them.

[0426] The RNA targeting CRISPR system of the invention can be applied in areas of in-planta RNAi technologies, without undue experimentation, from this disclosure, including insect pest management, plant disease management and management of herbicide resistance, as well as in plant assay and for other applications (see, for instance Kim et al., in Pesticide Biochemistry and Physiology (Impact Factor: 2.01). 01/2015; 120. DOI: 10.1016/j.pestbp.2015.01.002; Sharma et al. in Academic Journals (2015), Vol. 12(18) pp 2303-2312); Green J. M, in Pest Management Science, Vol 70(9), pp 1351-1357), because the present application provides the foundation for informed engineering of the system.

### Use of RNA Targeting CRISPR System to Modify Riboswitches and Control Metabolic Regulation in Plants, Algae and Fungi

[0427] Riboswitches (also known as aptozymes) are regulatory segments of messenger RNA that bind small molecules and in turn regulate gene expression. This mechanism allows the cell to sense the intracellular concentration of these small molecules. A particular riboswitch typically regulates its adjacent gene by altering the transcription, the translation or the splicing of this gene. Thus, in particular embodiments of the present invention, control of riboswitch activity is envisaged through the use of the RNA targeting protein in combination with a suitable guide RNA to target the riboswitch. This may be through cleavage of, or binding to, the riboswitch. In particular embodiments, reduction of riboswitch activity is envisaged. Recently, a riboswitch that binds thiamin pyrophosphate (TPP) was characterized and found to regulate thiamin biosynthesis in plants and algae. Furthermore it appears that this element is an essential regulator of primary metabolism in plants (Bocobza and Aharoni, Plant J. 2014 Aug; 79(4):693-703. doi: 10.1111/tpj.12540. Epub 2014 Jun. 17). TPP riboswitches are also found in certain fungi, such as in Neurospora crassa, where it controls alternative splicing to conditionally produce an Upstream Open Reading Frame (uORF), thereby affecting the expression of downstream genes (Cheah M T et al., (2007) Nature 447 (7143): 497-500. doi:10.1038/nature05769) The RNA targeting CRISPR system described herein may be used to manipulate the endogenous riboswitch activity in plants, algae or fungi and as such alter the expression of downstream genes controlled by it. In particular embodiments, the RNA targeting CRISP system may be used in assaying riboswitch function in vivo or in vitro and in studying its relevance for the metabolic network. In particular embodiments the RNA targeting CRISPR system may potentially be used for engineering of riboswitches as metabolite sensors in plants and platforms for gene control.

### Use of RNA Targeting CRISPR System in RNAi Screens for Plants, Algae or Fungi

[0428] Identifying gene products whose knockdown is associated with phenotypic changes, biological pathways can be interrogated and the constituent parts identified, via RNAi screens. In particular embodiments of the invention, control may also be exerted over or during these screens by use of the Guide 29 or Guide 30 protein and suitable guide RNA described herein to remove or reduce the activity of the RNA.i in the screen and thus reinstate the activity of the (previously interfered with) gene product (by removing or reducing the interference/repression).

### Use of RNA Targeting Proteins for Visualization of RNA Molecules In Vivo and In Vitro

[0429] In particular embodiments, the invention provides a nucleic acid binding system. In situ hybridization of RNA with complementary probes is a powerful technique. Typically fluorescent DNA oligonucleotides are used to detect nucleic acids by hybridization. Increased efficiency has been attained by certain modifications, such as locked nucleic acids (LNAs), but there remains a need for efficient and versatile alternatives. As such, labelled elements of the RNA targeting system can be used as an alternative for efficient and adaptable system for in situ hybridization

### Further Applications of the RNA Targeting CRISPR System in Plants and Yeasts

### Use of RNA Targeting CRLSTR System in Biofuel Production

[0430] The term “biofuel” as used herein is an alternative fuel made from plant and plant-derived resources. Renewable biofuels can be extracted from organic matter whose energy has been obtained through a process of carbon fixation or are made through the use or conversion of biomass. This biomass can be used directly for biofuels or can be converted to convenient energy containing substances by thermal conversion, chemical conversion, and biochemical conversion. This biomass conversion can result in fuel in solid, liquid, or gas form. There are two types of biofuels: bioethanol and biodiesel. Bioethanol is mainly produced by the sugar fermentation process of cellulose (starch), which is mostly derived from maize and sugar cane. Biodiesel on the other hand is mainly produced from oil crops such as rapeseed, palm, and soybean. Biofuels are used mainly for transportation.

### Enhancing Plant Properties for Biofuel Production

[0431] In particular embodiments, the methods using the RNA targeting CRISPR system as described herein are used to alter the properties of the cell wall in order to facilitate access by key hydrolysing agents for a more efficient release of sugars for fermentation. In particular embodiments, the biosynthesis of cellulose and/or lignin are modified. Cellulose is the major component of the cell wall. The biosynthesis of cellulose and lignin are co-regulated. By reducing the proportion of lignin in a plant the proportion of cellulose can be increased. In particular embodiments, the methods described herein are used to downregulate lignin biosynthesis in the plant so as to increase fermentable carbohydrates. More particularly, the methods described herein are used to downregulate at least a first lignin biosynthesis gene selected from the group consisting of 4-coumarate 3-hydroxylase (C3H), phenylalanine ammonia-lyase (PAL), cinnamate 4-hydroxylase (C4H), hydroxycinnamoyl transferase (HCT), caffeic acid O-methyltransferase (COMT), caffeoyl CoA 3-O-methyltransferase (CCoAOMT), ferulate 5-hydroxylase (F5H), cinnamyl alcohol dehydrogenase (CAD), cinnamoyl CoA-reductase (CCR), 4-coumarate-CoA ligase (4CL), monolignol-lignin-specific glycosyltransferase, and aldehyde dehydrogenase (ALDH) as disclosed in WO 2008064289 A2.

[0432] In particular embodiments, the methods described herein are used to produce plant mass that produces lower levels of acetic acid during fermentation (see also WO 2010096488).

### Modifying Yeast for Biofuel Production

[0433] In particular embodiments, the RNA targeting enzyme provided herein is used for bioethanol production by recombinant micro-organisms. For instance, RNA targeting enzymes can be used to engineer micro-organisms, such as yeast, to generate biofuel or biopolymers from fermentable sugars and optionally to be able to degrade plant-derived lignocellulose derived from agricultural waste as a source of fermentable sugars. More particularly, the invention provides methods whereby the RNA targeting CRISPR complex is used to modify the expression of endogenous genes required for biofuel production and/or to modify endogenous genes why may interfere with the biofuel synthesis. More particularly the methods involve stimulating the expression in a micro-organism such as a yeast of one or more nucleotide sequence encoding enzymes involved in the conversion of pyruvate to ethanol or another product of interest. In particular embodiments the methods ensure the stimulation of expression of one or more enzymes which allows the micro-organism to degrade cellulose, such as a cellulase. In yet further embodiments, the RNA targeting CRISPR complex is used to suppress endogenous metabolic pathways which compete with the biofuel production pathway.

### Modifying Algae and Plants for Production of Vegetable Oils or Biofuels

[0434] Transgenic algae or other plants such as rape may be particularly useful in the production of vegetable oils or biofuels such as alcohols (especially methanol and ethanol), for instance. These may be engineered to express or overexpress high levels of oil or alcohols for use in the oil or biofuel industries.

[0435] U.S. Pat. No. 8,945,839 describes a method for engineering Micro-Algae (Chlamydomonas reinhardtii cells) species) using Cas9. Using similar tools, the methods of the RNA targeting CRISPR system described herein can be applied on Chlamydomonas species and other algae. In particular embodiments, the RNA targeting effetor protein and guide RNA are introduced in algae expressed using a vector that expresses the RNA targeting effector protein under the control of a constitutive promoter such as Hsp70A-Rbc S2 or Beta2 -tubulin. Guide RNA will be delivered using a vector containing T7 promoter. Alternatively, in vitro transcribed guide RNA can be delivered to algae cells. Electroporation protocol follows standard recommended protocol from the GeneArt Chlamydomonas Engineering kit.

### Particular Applications of the RNA Targeting Enzymes in Plants

[0436] In particular embodiments, present invention can be used as a therapy for virus removal in plant systems as it is able to cleave viral RNA. Previous studies in human systems have demonstrated the success of utilizing CRISPR in targeting the single strand RNA virus, hepatitis C (A. Price, et al., Proc. Natl. Acad. Sci, 2015). These methods may also be adapted for using the RNA targeting CRISPR system in plants.

### Improved Plants

[0437] The present invention also provides plants and yeast cells obtainable and obtained by the methods provided herein. The improved plants obtained by the methods described herein may be useful in food or feed production through the modified expression of genes which, for instance ensure tolerance to plant pests, herbicides, drought, low or high temperatures, excessive water, etc.

[0438] The improved plants obtained by the methods described herein, especially crops and algae may be useful in food or feed production through expression of, for instance, higher protein, carbohydrate, nutrient or vitamin levels than would normally be seen in the wildtype. In this regard, improved plants, especially pulses and tubers are preferred.

[0439] Improved algae or other plants such as rape may be particularly useful in the production of vegetable oils or biofuels such as alcohols (especially methanol and ethanol), for instance. These may be engineered to express or overexpress high levels of oil or alcohols for use in the oil or biofuel industries.

[0440] The invention also provides for improved parts of a plant. Plant parts include, but are not limited to, leaves, stems, roots, tubers, seeds, endosperm, ovule, and pollen. Plant parts as envisaged herein may he viable, nonviable, regeneratable, and/or non-regeneratable.

[0441] It is also encompassed herein to provide plant cells and plants generated according to the methods of the invention. Gametes, seeds, embryos, either zygotic or somatic, progeny or hybrids of plants comprising the genetic modification, which are produced by traditional breeding methods, are also included within the scope of the present invention. Such plants may contain a heterologous or foreign DNA sequence inserted at or instead of a target sequence. Alternatively, such plants may contain only an alteration (mutation, deletion, insertion, substitution) in one or more nucleotides. As such, such plants will only be different from their progenitor plants by the presence of the particular modification.

[0442] In an embodiment of the invention, a C2c2 system is used to engineer pathogen resistant plants, for example by creating resistance against diseases caused by bacteria, fungi or viruses. In certain embodiments, pathogen resistance can be accomplished by engineering crops to produce a C2c2 system that wil be ingested by an insect pest, leading to mortality. In an embodiment of the invention, a C2c2 system is used to engineer abiotic stress tolerance. In another embodiment, a C2c2 system is used to engineer drought stress tolerance or salt stress tolerance, or cold or heat stress tolerance. Younis et al. 2014, :Int. J. Biol. Sci. 10;1150 reviewed potential targets of plant breeding methods, all of which are amenable to correction or improvement through use of a C2c2 system described herein. Some non-limiting target crops include Arabidops Zea mays is thaliana, Oryza saliva L, Prunus domestica L., Gossypium hirsutum, Nicotiana rustica, Zea mays, Medicago sativa, Nicotiana benthamiana and Arabidopsis thaliana

[0443] In an embodiment of the invention, a C2c2 system is used for management of crop pests. For example, a C2c2 system operable in a crop pest can be expressed from a plant host or transferred directly to the target, for example using a viral vector.

[0444] In an embodiment, the invention provides a method of efficiently producing homozygous organisms from a heterozygous non-human starting organism. In an embodiment, the invention is used in plant breeding. In another embodiment, the invention is used in animal breeding. In such embodiments, a homozygous organism such as a plant or animal is made by preventing or suppressing recombination by interfering with at least one target gene involved in double strand breaks, chromosome pairing and/or strand exchange.

### Application of the C2C2 Proteins in Optimized Functional RNA Targeting Systems

[0445] In an aspect the invention provides a system for specific delivery of functional components to the RNA environment, This can be ensured using the CRISPR systems comprising the RNA targeting effector proteins of the present invention which allow specific targeting of different components to RNA. More particularly such components include activators or repressors, such as activators or repressors of RNA translation, degradation, etc. Applications of this system are described elsewhere herein.

[0446] According to one aspect the invention provides non-naturally occurring or engineered composition comprising a guide RNA comprising a guide sequence capable of hybridizing to a target sequence in a genomic locus of interest in a cell, wherein the guide RNA is modified by the insertion of one or more distinct RNA sequence(s) that bind an adaptor protein. In particular embodiments, the RNA sequences may bind to two or more adaptor proteins (e.g. apta.mers), and wherein each adaptor protein is associated with one or more functional domains. The guide RNAs of the c2c2 enzymes described herein are shown to be amenable to modification of the guide sequence. In particular embodiments, the guide RNA is modified by the insertion of distinct RNA sequence(s) 5′ of the direct repeat, within the direct repeat, or 3′ of the guide sequence. When there is more than one functional domain, the functional domains can be same or different, e.g., two of the same or two different activators or repressors. In an aspect the invention provides a herein-discussed composition, wherein the one or more functional domains are attached to the RNA targeting enzyme so that upon binding to the target RNA the functional domain is in a spatial orientation allowing for the functional domain to function in its attributed function; In an aspect the invention provides a herein-discussed composition, wherein the composition comprises a CRISPR-Cas complex having at least three functional domains, at least one of which is associated with the RNA targeting enzyme and at least two of which are associated with the gRNA.

[0447] Accordingly, in an aspect the invention provides non-naturally occurring or engineered CRISPR-Cas complex composition comprising the guide RNA as herein-discussed and a CRISPR enzyme which is an RNA targeting enzyme, wherein optionally the RNA targeting enzyme comprises at least one mutation, such that the RNA targeting enzyme has no more than 5% of the nuclease activity of the enzyme not having the at least one mutation, and optionally one or more comprising at least one or more nuclear localization sequences. In particular embodiments, the guide RNA is additionally or alternatively modified so as to still ensure binding of the RNA targeting enzyme but to prevent cleavage by the RNA targeting enzyme (as detailed elsewhere herein).

[0448] In particular embodiments, the RNA targeting enzyme is a c2c2 enzyme which has a diminished nuclease activity of at least 97%, or 100% as compared with the c2c2 enzyme not having the at least one mutation. In an aspect the invention provides a herein-discussed composition, wherein the C2c2 enzyme comprises two or more mutations. The mutations may be selected from mutations of one or more of the following amino acid residues: R597, H602, R1278, and H1283, such as for instance one or more of the following mutations: R597A, H602A, R1278A, and H1283A, according to Leptotrichia shahii c2c2 protein or a corresponding position in an ortholog.

[0449] In particular embodiments, an RNA targeting system is provided as described herein above comprising two or more functional domains. In particular embodiments, the two or more functional domains are heterologous functional domain. In particular embodiments, the system comprises an adaptor protein which is a fusion protein comprising a functional domain, the fusion protein optionally comprising a linker between the adaptor protein and the functional domain. In particular embodiments, the linker includes a GlySer linker. Additionally or alternatively, one or more functional domains are attached to the RNA effector protein by way of a linker, optionally a GlySer linker. In particular embodiments, the one or more functional domains are attached to the RNA targeting enzyme through one or both of the HEPN domains.

[0450] In an aspect the invention provides a herein-discussed composition, wherein the one or more functional domains associated with the adaptor protein or the RNA targeting enzume is a domain capable of activating or repressing RNA translation. In an aspect the invention provides a herein-discussed composition, wherein at least one of the one or more functional domains associated with the adaptor protein have one or more activities comprising tnethylase activity, demethylase activity, transcription activation activity, transcription repression activity, transcription release factor activity, histone modification activity, DNA integration activity RNA cleavage activity, DNA cleavage activity or nucleic acid binding activity, or molecular switch activity or chemical inducibility or light inducibility.

[0451] In an aspect the invention provides a herein-discussed composition comprising an aptamer sequence. In particular embodiments, the a.ptatner sequence is two or more aptamer sequences specific to the same adaptor protein. In an aspect the invention provides a herein-discussed composition, wherein the aptamer sequence is two or more aptamer sequences specific to different adaptor protein. In an aspect the invention provides a herein-discussed composition, wherein the adaptor protein comprises MS2, PP7, Qβ, F2, GA, fr, JP501, M12, R17, BZ13, JP34, JP500, KUI, M11, MX1, TW18, VK, SP, FI, NL95, TW19, AP205, φCb5, φCb8r, φCb12r, φCb23r, 7s, PRR1. Accordingly, in particular embodiments, the aptamer is selected from a binding protein specifically binding any one of the adaptor proteins listed above. In an aspect the invention provides a herein-discussed composition, wherein the cell is a eukaryotic cell. In an aspect the invention provides a herein-discussed composition, wherein the eukaryotic cell is a mammalian cell, a plant cell or a yeast cell, whereby the mammalian cell is optionally a mouse cell. In an aspect the invention provides a herein-discussed composition, wherein the mammalian cell is a human cell.

[0452] In an aspect the invention provides a herein above-discussed composition wherein there is more than one gRNA, and the gRNAs target different sequences whereby when the composition is employed, there is multiplexing. In an aspect the invention provides a composition wherein there is more than one gRNA modified by the insertion of distinct RNA sequence(s) that bind to one or more adaptor proteins.

[0453] In an aspect the invention provides a herein-discussed composition wherein one or more adaptor proteins associated with one or more functional domains is present and bound to the distinct RNA sequence(s) inserted into the guide RNA(s).

[0454] In an aspect the invention provides a herein-discussed composition wherein the guide RNA is modified to have at least one non-coding functional loop; e.g., wherein the at least one non-coding functional loop is repressive; for instance, wherein at least one non-coding functional loop comprises Alu.

[0455] In an aspect the invention provides a method for modifying gene expression comprising the administration to a host or expression in a host in vivo of one or more of the compositions as herein-discussed.

[0456] In an aspect the invention provides a herein-discussed method comprising the delivery of the composition or nucleic acid molecule(s) coding therefor, wherein said nucleic acid molecule(s) are operatively linked to regulatory sequence(s) and expressed in vivo. In an aspect the invention provides a herein-discussed method wherein the expression in vivo is via a lentivirus, an adenovirus, or an AAV.

[0457] In an aspect the invention provides a mammalian cell. line of cells as herein-discussed, wherein the cell line is, optionally, a human cell line or a mouse cell line. In an aspect the invention provides a transgenic mammalian model, optionally a mouse, wherein the model has been transformed with a herein-discussed composition or is a progeny of said transformant.

[0458] In an aspect the invention provides a nucleic acid molecule(s encoding guide RNA or the RNA targeting CRISPR-Cas complex or the composition as herein-discussed. In an aspect the invention provides a vector comprising: a nucleic acid molecule encoding a guide RNA (gRNA) comprising a guide sequence capable of hybridizing to a target sequence in a genornic locus of interest in a cell, wherein the direct repeat of the gRNA is modified by the insertion of distinct RNA sequence(s) that bind(s) to two or more adaptor proteins, and wherein each adaptor protein is associated with one or more functional domains; or, wherein the gRNA is modified to have at least one non-coding functional loop. In an aspect the invention provides vector(s) comprising nucleic acid molecule(s) encoding: non-naturally occurring or engineered CRISPR-Cas complex composition comprising the gRNA herein-discussed, and an RNA targeting enzyme, wherein optionally the RNA targeting enzyme comprises at least one mutation, such that the RNA targeting enzyme has no more than 5% of the nuclease activity of the RNA targeting enzyme not having the at least one mutation, and optionally one or more comprising at least one or more nuclear localization sequences. In an aspect a vector can further comprise regulatory element(s) operable in a eukaryotic cell operably linked to the nucleic acid molecule encoding the guide RNA (gRNA) and/or the nucleic acid molecule encoding the RNA targeting enzyme and/or the optional nuclear localization sequence(s).

[0459] In one aspect, the invention provides a kit comprising one or more of the components described hereinabove. In some embodiments, the kit comprises a vector system as described above and instructions for using the kit.

[0460] In an aspect the invention provides a method of screening for gain of function (GOF) or loss of function (LOF) or for screening non-coding RNAs or potential regulatory regions (e.g. enhancers, repressors) comprising the cell line of as herein-discussed or cells of the model herein-discussed containing or expressing the RNA targeting enzyme and introducing a composition as herein-discussed into cells of the cell line or model, whereby the gRNA includes either an activator or a repressor, and monitoring for GOF or LOF respectively as to those cells as to which the introduced gRNA includes an activator or as to those cells as to which the introduced gRNA includes a repressor.

[0461] In an aspect the invention provides a library of non-naturally occurring or engineered compositions, each comprising a RNA targeting CRISPR guide RNA (gRNA) comprising a guide sequence capable of hybridizing to a target RNA sequence of interest in a cell, an RNA targeting enzyme, wherein the RNA targeting enzyme comprises at least one mutation, such that the RNA targeting enzyme has no more than 5% of the nuclease activity of the RNA targeting enzyme not having the at least one mutation, wherein the gRNA is modified by the insertion of distinct RNA sequence(s) that bind to one or more adaptor proteins, and wherein the adaptor protein is associated with one or more functional domains, wherein the composition comprises one or more or two or more adaptor proteins, wherein the each protein is associated with one or more functional domains, and wherein the gRNAs comprise a genome wide library comprising a plurality of RNA targeting guide RNAs (gRNAs). In an aspect the invention provides a library as herein-discussed, wherein the RNA targeting RNA targeting enzyme has a diminished nuclease activity of at least 97%, or 100% as compare with the RNA targeting enzyme not having the at least one mutation. In an aspect the invention provides a library as herein-discussed, wherein the adaptor protein is a fusion protein comprising the functional domain. In an aspect the invention provides a library as herein discussed, wherein the gRNA is not modified by the insertion of distinct RNA sequence(s) that bind to the one or two or more adaptor proteins. In an aspect the invention provides a library as herein discussed, wherein the one or two or more functional domains are associated with the RNA targeting enzyme. In an aspect the invention provides a library as herein discussed, wherein the cell population of cells is a population of eukaryotic cells. In an aspect the invention provides a library as herein discussed, wherein the eukaryotic cell is a mammalian cell, a plant cell or a yeast cell. In an aspect the invention provides a library as herein discussed, wherein the mammalian cell is a human cell. In an aspect the invention provides a library as herein discussed, wherein the population of cells is a population of embryonic stem (ES) cells.

[0462] In an aspect the invention provides a library as herein discussed, wherein the targeting is of about 100 or more RNA sequences. In an aspect the invention provides a library as herein discussed, wherein the targeting is of about 1000 or more RNA sequences. In an aspect the invention provides a library as herein discussed, wherein the targeting is of about 20,000 or more sequences. In an aspect the invention provides a library as herein discussed, wherein the targeting is of the entire transcriptome. In an aspect the invention provides a library as herein discussed, wherein the targeting is of a panel of target sequences focused on a relevant or desirable pathway. In an aspect the invention provides a library as herein discussed, wherein the pathway is an immune pathway. In an aspect the invention provides a library as herein discussed, wherein the pathway is a cell division pathway.

[0463] In one aspect, the invention provides a method of generating a model eukaryotic cell comprising a gene with modified expression. In some embodiments, a disease gene is any gene associated an increase in the risk of having or developing a disease. In some embodiments, the method comprises (a) introducing one or more vectors encoding the components of the system described herein above into a eukaryotic cell, and (b) allowing a CRISPR complex to bind to a target polynucleotide so as to modify expression of a gene, thereby generating a model eukaryotic cell comprising modified gene expression.

[0464] The structural information provided herein allows for interrogation of guide RNA interaction with the target RNA and the RNA targeting enzyme permitting engineering or alteration of guide RNA structure to optimize functionality of the entire RNA targeting CRISPR-Cas system. For example, the guide RNA may be extended, without colliding with the RNA targeting protein by the insertion of adaptor proteins that can bind to RNA. These adaptor proteins can further recruit effector proteins or fusions which comprise one or more functional domains.

[0465] An aspect of the invention is that the above elements are comprised in a single composition or comprised in individual compositions. These compositions may advantageously be applied to a host to elicit a functional effect on the genomic level.

[0466] The skilled person will understand that modifications to the guide RNA which allow for binding of the adapter+functional domain but not proper positioning of the adapter+functional domain (e.g. due to steric hindrance within the three dimensial structure of the CRISPR complex) are modifications which are not intended. The one or more modified guide RNA may be modified, by introduction of a distinct RNA sequence(s) 5′ of the direct repeat, within the direct repeat, or 3′ of the guide sequence.

[0467] The modified guide RNA, the inactivated RNA targeting enzyme (with or without functional domains), and the binding protein with one or more functional domains, may each individually be comprised in a composition and administered to a host individually or collectively. Alternatively, these components may be provided in a single composition for administration to a host, Administration to a host may be performed via viral vectors known to the skilled person or described herein for delivery to a host (e.g. lentiviral vector, adenoviral vector, AAV vector). As explained herein, use of different selection markers (e.g. for lentiviral gRNA selection) and concentration of gRNA (e.g. dependent on whether multiple gRNAs are used) may be advantageous for eliciting an improved effect.

[0468] Using the provided compositions, the person skilled in the art can advantageously and specifically target single or multiple loci with the same or different functional domains to elicit one or more genomic events. The compositions may be applied in a wide variety of methods for screening in libraries in cells and functional modeling iii vivo (e.g. gene activation of lincRNA and indentification of function; gain-of-function modeling; loss-of-function modeling; the use the compositions of the invention to establish cell lines and transgenic animals for optimization and screening purposes). 1004621 The current invention comprehends the use of the compositions of the current invention to establish and utilize conditional or inducible CRISPR RNA targeting events. (See, e.g., Platt et al., Cell (2014), dx.doi.org/10.1016/j.cell.2014.09.014, or PCT patent publications cited herein, such as WO 2014/093622 (PCT/US2013/074667), which are not believed prior to the present invention or application). For example, the target cell comprises RNA targeting CRISRP enzyme conditionally or inducibly (e.g. in the form of Cre dependent constructs) and/or the adapter protein conditionally or inducibly and, on expression of a vector introduced into the target cell, the vector expresses that which induces or gives rise to the condition of s RNA targeting enzyme expression and/or adaptor expression in the target cell. By applying the teaching and compositions of the current invention with the known method of creating a CRISPR complex, inducible gene expression affected by functional domains are also an aspect of the current invention. Alternatively, the adaptor protein may be provided as a conditional or inducible element with a conditional or inducible s RNA targeting enzyme to provide an effective model for screening purposes, which advantageously only requires minimal design and administration of specific gRNAs for a broad number of applications.

### Guide RNA According to the Invention Comprising a Dead Guide Sequence

[0469] In one aspect, the invention provides guide sequences which are modified in a manner which allows for formation of the CRISPR complex and successful binding to the target, while at the same time, not allowing for successful nuclease activity (i.e. without nuclease activity/without indel activity). For matters of explanation such modified guide sequences are referred to as “dead guides” or “dead guide sequences”. These dead guides or dead guide sequences can be thought of as catalytically inactive or conformationally inactive with regard to nuclease activity. Indeed, dead guide sequences may not sufficiently engage in productive base pairing with respect to the ability to promote catalytic activity or to distinguish on-target and off-target binding activity. Briefly, the assay involves synthesizing a CRISPR target RNA and guide RNAs comprising mismatches with the target RNA, combining these with the RNA targeting enzyme and analyzing cleavage based on gels based on the presence of bands generated by cleavage products, and quantifying cleavage based upon relative band intensities.

[0470] Hence, in a related aspect, the invention provides a non-naturally occurring or engineered composition RNA targeting CRISPR-Cas system comprising a functional RNA targeting as described herein, and guide RNA (gRNA) wherein the gRNA comprises a dead guide sequence whereby the gRNA is capable of hybridizing to a target sequence such that the RNA targeting CRISPR-Cas system is directed to a genomic locus of interest in a cell without detectable RNA cleavage activity of a non-mutant RNA targeting enzyme of the system. It is to be understood that any of the gRNAs according to the invention as described herein elsewhere may be used as dead gRNAs/gRNAs comprising a dead guide sequence as described herein below. Any of the methods, products, compositions and uses as described herein elsewhere is equally applicable with the dead gRNAs/gRNAs comprising a dead guide sequence as further detailed below. By means of further guidance, the following particular aspects and embodiments are provided.

[0471] The ability of a dead guide sequence to direct sequence-specific binding of a CRISPR complex to an RNA target sequence may be assessed by any suitable assay. For example, the components of a CRISPR system sufficient to form a CRISPR complex, including the dead guide sequence to be tested, may be provided to a host cell having the corresponding target sequence, such as by transfection with vectors encoding the components of the CRISPR sequence, followed by an assessment of preferential cleavage within the target sequence. For instance, cleavage of a target RNA polynucleotide sequence may be evaluated in a test tube by providing the target sequence, components of a CRISPR complex, including the dead guide sequence to be tested and a control guide sequence different from the test dead guide sequence, and comparing binding or rate of cleavage at the target sequence between the test and control guide sequence reactions. Other assays are possible, and will occur to those skilled in the art. A dead guide sequence may be selected to target any target sequence. In some embodiments, the target sequence is a sequence within a genome of a cell.

[0472] As explained further herein, several structural parameters allow for a proper framework to arrive at such dead guides. Dead guide sequences are typically shorter than respective guide sequences which result in active RNA cleavage. In particular embodiments, dead guides are 5?, 10%, 20%, 30%, 40%, 50%, shorter than respective guides directed to the same.

[0473] As explained below and known in the art, one aspect of gRNA-RNA targeting specificity is the direct repeat sequence, which is to be appropriately linked to such guides. In particular, this implies that the direct repeat sequences are designed dependent on the origin of the RNA targeting enzyme. Thus, structural data available for validated dead guide sequences may be used for designing C2c2 specific equivalents. Structural similarity between, e.g., the orthologous nuclease domains HEPN of two or more C2c2 effector proteins may be used to transfer design equivalent dead guides. Thus, the dead guide herein may be appropriately modified in length and sequence to reflect such C2c2 specific equivalents, allowing for formation of the CRISPR complex and successful binding to the target RNA, while at the same time, not allowing for successful nuclease activity.

[0474] The use of dead guides in the context herein as well as the state of the art provides a surprising and unexpected platform for network biology and/or systems biology in both in vitro, ex vivo, and in vivo applications, allowing for multiplex gene targeting, and in particular bidirectional multiplex gene targeting. Prior to the use of dead guides, addressing multiple targets has been challenging and in some cases not possible. With the use of dead guides, multiple targets, and thus multiple activities, may be addressed, for example, in the same cell, in the same animal, or in the same patient. Such multiplexing may occur at the same time or staggered for a desired timeframe.

[0475] For example, the dead guides allow to use gRNA as a means for gene targeting, without the consequence of nuclease activity, while at the same time providing directed means for activation or repression. Guide RNA comprising a dead guide may be modified to further include elements in a manner which allow for activation or repression of gene activity, in particular protein adaptors (e.g. aptamers) as described herein elsewhere allowing for functional placement of gene effectors (e.g. activators or repressors of gene activity). One example is the incorporation of aptamers, as explained herein and in the state of the art. By engineering the gRNA comprising a dead guide to incorporate protein-interacting aptamers (Konermann et al., “Genome-scale transcription activation by an engineered CRISPR-Cas9 complex,” doi:10.1038/nature14136, incorporated herein by reference), one may assemble multiple distinct effector domains. Such may be modeled after natural processes.

[0476] Thus, one aspect is a gRNA of the invention which comprises a dead guide, wherein the gRNA further comprises modifications which provide for gene activation or repression, as described herein. The dead gRNA may comprise one or more aptamers. The aptamers may be specific to gene effectors, gene activators or gene repressors. Alternatively, the aptamers may be specific to a protein which in turn is specific to and recruits/binds a specific gene effector, gene activator or gene repressor. If there are multiple sites for activator or repressor recruitment, it is preferred that the sites are specific to either activators or repressors. If there are multiple sites for activator or repressor binding, the sites may be specific to the same activators or same repressors. The sites may also be specific to different activators or different repressors. The effectors, activators, repressors may be present in the form of fusion proteins.

[0477] In an aspect, the invention provides a method of selecting a dead guide RNA targeting sequence for directing a functionalized CRISPR system to a gene locus in an organism, which comprises: a) locating one or more CRISPR motifs in the gene locus; b) analyzing the 20 nt sequence downstream of each CRISPR motif by: i) determining the GC content of the sequence; and ii) determining whether there are off-target matches of the first 15 nt of the sequence in the genome of the organism; c) selecting the sequence for use in a guide RNA if the GC content of the sequence is 70% or less and no off-target matches are identified. In an embodiment, the sequence is selected if the GC content is 50% or less. In an embodiment, the sequence is selected if the GC content is 40% or less. In an embodiment, the sequence is selected if the GC content is 30% or less. In an embodiment, two or more sequences are analyzed and the sequence having the lowest GC content is selected. In an embodiment, off-target matches are determined in regulatory sequences of the organism. In an embodiment, the gene locus is a regulatory region. An aspect provides a dead guide RNA comprising the targeting sequence selected according to the aforementioned methods.

[0478] In an aspect, the invention provides a dead guide RNA for targeting a functionalized CRISPR system to a gene locus in an organism. In an embodiment of the invention, the dead guide RNA comprises a targeting sequence wherein the CG content of the target sequence is 70% or less, and the first 15 nt of the targeting sequence does not match an off-target sequence downstream from a CRISPR motif in the regulatory sequence of another gene locus in the organism. in certain embodiments, the GC content of the targeting sequence 60% or less, 55% or less, 50% or less, 45% or less, 40% or less, 35% or less or 30% or less. In certain embodiments, the GC content of the targeting sequence is from 70% to 60% or from 60% to 50% or from 50% to 40% or from 40% to 30%. In an embodiment, the targeting sequence has the lowest CG content among potential targeting sequences of the locus.

[0479] In an embodiment of the invention, the first 15 nt of the dead guide match the target sequence. :In nother embodiment, first 14 nt of the dead guide match the target sequence. In another embodiment, the first 13 nt of the dead guide match the target sequence. In another embodiment first 12 nt of the dead guide match the target sequence. In another embodiment, first 11 nt of the dead guide match the target sequence. In another embodiment, the first 10 nt of the dead guide match the target sequence. In an embodiment of the invention the first 15 nt of the dead guide does not match an off-target sequence downstream from a CRISPR. motif in the regulatory region of another gene locus. In other embodiments, the first 14 nt, or the first 13 nt of the dead guide, or the first 12 nt of the guide, or the first 11 nt of the dead guide, or the first 10 nt of the dead guide, does not match an off-target sequence downstream from a CRISPR motif in the regulatory region of another gene locus. in other embodiments, the first 15 nt, or 14 nt, or 13 nt, or 12 nt, or 11 nt of the dead guide do not match an off-target sequence downstream from a CRISPR motif in the genome.

[0480] In certain embodiments, the dead guide RNA includes additional nucleotides at the 3′-end that do not match the target sequence. Thus, a dead guide RNA that includes the first 20-28 nt, downstream of a CRISPR motif can be extended in length at the 3′ end.

### General Provisions

[0481] In an aspect, the invention provides a nucleic acid binding system. In situ hybridization of RNA with complementary probes is a powerful technique. Typically fluorescent DNA oligonucleotides are used to detect nucleic acids by hybridization. Increased efficiency has been attained by certain modifications, such as locked nucleic acids (LNAs), but there remains a need for efficient and versatile alternatives. The invention provides an efficient and adaptable system for in situ hybridization.

[0482] In embodiments of the invention the terms guide sequence and guide RNA are used interchangeably as in foregoing cited documents such as WO 2014/093622 (PCT/US2013/074667). In general, a guide sequence is any polynucleotide sequence having sufficient complementarity with a target polynucleotide sequence to hybridize with the target sequence and direct sequence-specific binding of a CRISPR complex to the target sequence. In some embodiments, the degree of complementarity between a guide sequence and its corresponding target sequence, when optimally aligned using a suitable alignment algorithm, is about or more than about 50%, 60%. 75%, 80%, 85%, 90%, 95%, 97.5%, 99%, or more. Optimal alignment may be determined with the use of any suitable algorithm for aligning sequences, non-limiting example of which include the Smith-Waterman algorithm, the Needleman-Wunsch algorithm, algorithms based on the Burrows-Wheeler Transform (e.g., the Burrows Wheeler Aligner), ClustalW, Clustal X, BLAT, Novoalign (Novocraft Technologies; available at www.novocraft.com), ELAND (Illumina, San Diego, Calif.), SOAP (available at soap.genomics.org.cn), and Maq (available at maq.sourceforge.net). In some embodiments, a guide sequence is about or more than about 5, 10, 11, 12, 13, 14, 15, 16, 17, 18, 19, 20, 21, 22, 23, 24, 25, 26, 27, 28, 29, 30, 35, 40, 45, 50, 75, or more nucleotides in length. In some embodiments, a guide sequence is less than about 75, 50, 45. 40, 35, 30, 25, 20, 15, 12, or fewer nucleotides in length. Preferably the guide sequence is 10-30 nucleotides long. The ability of a guide sequence to direct sequence-specific binding of a CRISPR complex to a target sequence may be assessed by any suitable assay. For example, the components of a CRISPR system sufficient to form a CRISPR complex, including the guide sequence to be tested, may be provided to a host cell having the corresponding target sequence, such as by transfection with vectors encoding the components of the CRISPR sequence, followed by an assessment of preferential cleavage within the target sequence, such as by Surveyor assay as described herein. Similarly, cleavage of a target polynucleotide sequence may be evaluated in a test tube by providing the target sequence, components of a CRISPR complex, including the guide sequence to be tested and a control guide sequence different from the test guide sequence, and comparing binding or rate of cleavage at the target sequence between the test and control guide sequence reactions. Other assays are possible, and will occur to those skilled in the art. A guide sequence may be selected to target any target sequence. In some embodiments, the target sequence is a sequence within a genome of a cell. Exemplary target sequences include those that are unique in the target genome.

[0483] In general, and throughout this specification, the term “vector” refers to a nucleic acid molecule capable of transporting another nucleic acid to which it has been linked. Vectors include, but are not limited to, nucleic acid molecules that are single-stranded, double-stranded, or partially double-stranded; nucleic acid molecules that comprise one or more free ends, no free ends (e.g., circular); nucleic acid molecules that comprise DNA, RNA, or both; and other varieties of polynucleotides known in the art. One type of vector is a “plasmid,” which refers to a circular double stranded DNA loop into which additional DNA segments can be inserted, such as by standard molecular cloning techniques. Another type of vector is a viral vector, wherein virally-derived DNA or RNA sequences are present in the vector for packaging into a virus (e.g., retroviruses, replication defective retroviruses, adenoviruses, replication defective adenoviruses, and adeno-associated viruses). Viral vectors also include polynucleotides carried by a virus for transfection into a host cell. Certain vectors are capable of autonomous replication in a host cell into which they are introduced (e.g., bacterial vectors having a bacterial origin of replication and episomal mammalian vectors). Other vectors (e.g., non-episomal mammalian vectors) are integrated into the genome of a host cell upon introduction into the host cell, and thereby are replicated along with the host genome. Moreover, certain vectors are capable of directing the expression of genes to which they are operatively-linked. Such vectors are referred to herein as “expression vectors.” Vectors for and that result in expression in a eukaryotic cell can be referred to herein as “eukaryotic expression vectors.” Common expression vectors of utility in recombinant DNA techniques are often in the form of plasmids.

[0484] Recombinant expression vectors can comprise a nucleic acid of the invention in a form suitable for expression of the nucleic acid in a host cell, which means that the recombinant expression vectors include one or more regulatory elements, which may be selected on the basis of the host cells to be used for expression, that is operatively-linked to the nucleic acid sequence to be expressed. Within a recombinant expression vector, “operably linked” is intended to mean that the nucleotide sequence of interest is linked to the regulatory element(s) in a manner that allows for expression of the nucleotide sequence (e.g., in an in vitro transcription/translation system or in a host cell when the vector is introduced into the host cell),

[0485] The term “regulatory element” is intended to include promoters, enhancers, internal ribosomal entry sites (IRES), and other expression control elements (e.g., transcription termination signals, such as polyadenylation signals and poly-U sequences) Such regulatory elements are described, for example, in Goeddel, GENE EXPRESSION TECHNOLOGY: METHODS IN ENZYMOLOGY 185, Academic Press, San Diego, Calif. (1990). Regulatory elements include those that direct constitutive expression of a nucleotide sequence in many types of host cell and those that direct expression of the nucleotide sequence only in certain host cells (e.g., tissue-specific regulatory sequences). A tissue-specific promoter may direct expression primarily in a desired tissue of interest, such as muscle, neuron, bone, skin, blood, specific organs (e.g., liver, pancreas), or particular cell types (e.g., lymphocytes). Regulatory elements may also direct expression in a temporal-dependent manner, such as in a cell-cycle dependent or developmental stage-dependent manner, which may or may not also be tissue or cell-type specific. In some embodiments, a vector comprises one or more pol III promoter (e.g., 1, 2, 3, 4, 5, or more pol III promoters), one or more pol II promoters (e.g., 1, 2, 3, 4, 5, or more pol II promoters), one or more pol I promoters (e.g., 1, 2, 3, 4, 5, or more pol I promoters or combinations thereof. Examples of pol III promoters include, but are not limited to, U6 and H1 promoters. Examples of pol II promoters include, but are not limited to, the retroviral Rous sarcoma virus (RSV) LTR promoter (optionally with the RSV enhancer), the cytomegalovirus (CMV) promoter (optionally with the CMV enhancer) [see, e.g., Boshart et al, Cell, 41:521-530 (1985)], the SV40 promoter, the dihydrofolate reductase promoter, the β-actin promoter, the phosphoglycerol kinase (PGK) promoter, and the EF1α promoter. Also encompassed by the term “regulatory element” are enhancer elements, such as WPRE; CMV enhancers; the R-U5′ segment in LTR of HTLV-I (Mol. Cell. Biol., Vol. 8(1), p. 466-472, 1988); SV40 enhancer; and the intron sequence between exons 2. and 3 of rabbit β-globin (Proc. Natl. Acad. Sci. USA., Vol. 78(3), p. 1527-31, 1981). It will be appreciated by those skilled in the art that the design of the expression vector can depend on such factors as the choice of the host cell to be transformed, the level of expression desired, etc. A vector can be introduced into host cells to thereby produce transcripts, proteins, or peptides, including fusion proteins or peptides, encoded by nucleic acids as described herein (e.g., clustered regularly interspersed short palindromic repeats (CRISPR) transcripts, proteins, enzymes, mutant forms thereof, fusion proteins thereof, etc.).

[0486] Advantageous vectors include lentiviruses and adeno-associated viruses, and types of such vectors can also be selected for targeting particular types of cells.

[0487] As used herein, the term “crRNA” or “guide RNA” or “single guide RNA” or “sgRNA” or “one or more nucleic acid components” of a Type V or Type VI CRISPR-Cas locus effector protein comprises any polynucleotide sequence having sufficient complementarity with a target nucleic acid sequence to hybridize with the target nucleic acid sequence and direct sequence-specific binding of a nucleic acid-targeting complex to the target nucleic acid sequence. In some embodiments, the degree of complementarity, when optimally aligned using a suitable alignment algorithm, is about or more than about 50%, 60%, 75%, 80%, 85%, 90%, 95%, 97.5%, 99%, or more. Optimal alignment may be determined with the use of any suitable algorithm for aligning sequences, non-limiting example of which include the Smith-Waterman algorithm, the Needleman-Wunsch algorithm, algorithms based on the Burrows-Wheeler Transform (e.g., the Burrows Wheeler Aligner), ClustalW, Clustal X, BLAT, Novoalign (Novocraft Technologies; available at www.novocraft.com), ELAND (Illumina, San Diego, Calif.), SOAP (available at soap.genomicsorg.cn), and Maq (available at maq.sourceforge.net) The ability of a guide sequence (within a nucleic acid-targeting guide RNA) to direct sequence-specific binding of a nucleic acid -targeting complex to a target nucleic acid sequence may be assessed by any suitable assay. For example, the components of a nucleic acid-targeting CRISPR system sufficient to form a nucleic acid-targeting complex, including the guide sequence to be tested, may be provided to a host cell having the corresponding target nucleic acid sequence, such as by transfection with vectors encoding the components of the nucleic acid-targeting complex, followed by an assessment of preferential targeting (e.g., cleavage) within the target nucleic acid sequence, such as by Surveyor assay as described herein. Similarly, cleavage of a target nucleic acid sequence may be evaluated in a test tube by providing the target nucleic acid sequence, components of a nucleic acid -targeting complex, including the guide sequence to be tested and a control guide sequence different from the test guide sequence, and comparing binding or rate of cleavage at the target sequence between the test and control guide sequence reactions. Other assays are possible, and will occur to those skilled in the art. A guide sequence, and hence a nucleic acid-targeting guide RNA may be selected to target any target nucleic acid sequence. The target sequence may be DNA. The target sequence may be any RNA sequence. In some embodiments, the target sequence may be a sequence within a RNA molecule selected from the group consisting of messenger RNA (mRNA), pre-mRNA, ribosomaal RNA (rRNA), transfer RNA (tRNA), micro-RNA (miRNA), small interfering RNA (siRNA), small nuclear RNA (snRNA), small nucleolar RNA (snoRNA), double stranded RNA (dsRNA), non coding RNA (ncRNA), long non-coding RNA (lncRNA), and small cytoplasmatic RNA (scRNA). In some preferred embodiments, the target sequence may be a sequence within a RNA molecule selected from the group consisting of mRNA, pre-mRNA, and rRNA. In some preferred embodiments, the target sequence may be a sequence within a RNA molecule selected from the group consisting of ncRNA, and lncRNA. In some more preferred embodiments, the target sequence may be a sequence within an mRNA molecule or a pre-mRNA molecule.

[0488] In some embodiments, a nucleic acid-targeting guide RNA is selected to reduce the degree secondary structure within the RNA-targeting guide RNA. In some embodiments, about or less than about 75%, 50%, 40%, 30%, 25%, 20%, 15%, 10%, 5%, 1%, or fewer of the nucleotides of the nucleic acid-targeting guide RNA participate in self-complementary base pairing when optimally folded. Optimal folding may be determined by any suitable polynucleotide folding algorithm. Some programs are based on calculating the minimal Gibbs free energy. An example of one such algorithm is mFold, as described by Luker and Stiegler (Nucleic Acids Res. 9 (1981), 133-148). Another example folding algorithm is the online webserver RNAfold, developed at Institute for Theoretical Chemistry at the University of Vienna, using the centroid structure prediction algorithm (see e.g., A. R. Gruber et al., 2008, Cell 106(1): 23-24; and P A Carr and G M Church, 2009, Nature Biotechnology 27(12): 1151-62).

[0489] In certain embodiments, a guide RNA or crRNA may comprise, consist essentially of, or consist of a direct repeat (DR) sequence and a guide sequence or spacer sequence. In certain embodiments, the guide RNA or crRNA may comprise, consist essentially of, or consist of a direct repeat sequence fused or linked to a guide sequence or spacer sequence. In certain embodiments, the direct repeat sequence may be located upstream (i.e., 5′) from the guide sequence or spacer sequence. In other embodiments, the direct repeat sequence may be located downstream (i.e., 3′) from the guide sequence or spacer sequence.

[0490] In certain embodiments, the crRNA comprises a stem loop, preferably a single stem loop. In certain embodiments, the direct repeat sequence forms a stem loop, preferably a single stem loop.

[0491] In certain embodiments, the spacer length of the guide RNA is from 15 to 35 nt. In certain embodiments, the spacer length of the guide RNA is at least 15 nucleotides, preferably at least 18 nt, such at at least 19, 20, 21, 22, or more nt. In certain embodiments, the spacer length is from 15 to 17 nt, e.g., 15. 16, or 17 nt, from 17 to 20 nt, e.g., 17, 18, 19, or 20 nt, from 20 to 24 nt, e.g., 20, 21, 22, 23, or 24 nt, from 23 to 25 nt, e.g., 23, 24, or 25 nt, from 24 to 27 nt, e.g., 24, 26, or 27 nt, from 27-30 nt, e.g., 27, 28, 29, or 30 nt, from 30-35 nt, e.g., 30, 31, 32, 33, 34, or 35 nt, or 35 nt or longer.

[0492] Applicants also perform a challenge experiment to verify the DNA targeting and cleaving capability of a Type V protein such as C2c1 or C2c3. This experiment closely parallels similar work in E. coli for the heterologous expression of StCas9 (Sapranauskas, R. et al. Nucleic Acids Res 39, 9275-9282 (2011)). Applicants introduce a plasmid containing both a PAM and a resistance gene into the heterologous E. coli, and then plate on the corresponding antibiotic. If there is DNA cleavage of the plasmid, Applicants observe no viable colonies.

[0493] In further detail, the assay is as follows for a DNA target. Two E.coli strains are used in this assay. One carries a plasmid that encodes the endogenous effector protein locus from the bacterial strain. The other strain carries an empty plasmid (e.g.pACYC184, control strain). All possible 7 or 8 bp PAM sequences are presented on an antibiotic resistance plasmid (pUC19 with ampicillin resistance gene). The PAM is located next to the sequence of proto-spacer 1 (the DNA target to the first spacer in the endogenous effector protein locus). Two PAM libraries were cloned. One has a 8 random by 5′ of the proto-spacer (e.g. total of 65536 different PAM sequences=complexity). The other library has 7 random bp 3′ of the proto-spacer (e.g. total complexity is 16384 different PAMs). Both libraries were cloned to have in average 500 plasmids per possible PAM. Test strain and control strain were transformed with 5′PAM and 3′PAM library in separate transformations and transformed cells were plated separately on ampicillin plates. Recognition and subsequent cutting/interference with the plasmid renders a cell vulnerable to ampicillin and prevents growth. Approximately 12 h after transformation, all colonies formed by the test and control strains where harvested and plasmid DNA was isolated. Plasmid DNA was used as template for PCR amplification and subsequent deep sequencing. Representation of all PAMs in the untransfomed libraries showed the expected representation of PAMs in transformed cells. Representation of all PAMs found in control strains showed the actual representation. Representation of all PAMs in test strain showed which PAMs are not recognized by the enzyme and comparison to the control strain allows extracting the sequence of the depleted PAM.

[0494] For minimization of toxicity and off-target effect, it will be important to control the concentration of nucleic acid-targeting guide RNA delivered. Optimal concentrations of nucleic acid-targeting guide RNA can be determined by testing different concentrations in a cellular or non-human eukaryote animal model and using deep sequencing the analyze the extent of modification at potential off-target genomic loci. The concentration that gives the highest level of on-target modification while minimizing the level of off-target modification should be chosen for in vivo delivery. The nucleic acid-targeting system is derived advantageously from a Type VI CRISPR system. In some embodiments, one or more elements of a nucleic acid-targeting system is derived from a particular organism comprising an endogenous RNA-targeting system. In particular embodiments, the Type VI RNA-targeting Cas enzyme is C2c2. Non-limiting examples of Cas proteins include Cas1, Cas1B, Cast, Cas3, Cas4, Cas5, Cas6, Cas7, Cas8, Cas9 (also known as Csn1 and Csx12), Cas10, Csy1, Csy2, Csy3, Cse1, Cse2, Csc1, Csc2, Csa5, Csn2, Csm2, Csm3, Csm4, Csm5, Csm6, Cmr1, Cmr3, Cmr4, Cmr5, Cmr6, Csb1, Csb2, Csb3, Csx17, Csx14, Csx10, Csx16, CsaX, Csx3, Csx1, Csx15, Csf1, Csf2, Csf3, Csf4, homologues thereof, or modified versions thereof In embodiments, the Type VI protein such as C2c2as referred to herein also encompasses a homologue or an orthologue of a Type VI protein such as C2c2. The terms “orthologue” (also referred to as “ortholog” herein) and “homologue” (also referred to as “homolog” herein) are well known in the art. By means of further guidance, a “homologue” of a protein as used herein is a protein of the same species which performs the same or a similar function as the protein it is a homologue of. Homologous proteins may but need not be structurally related, or are only partially structurally related. An “orthologue” of a protein as used herein is a protein of a different species which performs the same or a similar function as the protein it is an orthologue of. Orthologous proteins may but need not be structurally related, or are only partially structurally related. In particular embodiments, the homologue or orthologue of a Type VI protein such as C2c2as referred to herein has a sequence homology or identity of at least 80%, more preferably at least 85%, even more preferably at least 90%, such as for instance at least 95% with a Type VI protein such as C2c2. In further embodiments, the homologue or orthologue of a Type VI protein such as C2c2as referred to herein has a sequence identity of at least 80%, more preferably at least 85%, even more preferably at least 90%, such as for instance at least 95% with the wild type Type VI protein such as C2c2.

[0495] In an embodiment, the Type V1 RNA-targeting Cas protein may be a C2c2ortholog of an organism of a genus which includes but is not limited to Corynebacter, Sutterella, Legionella, Treponema, Filifactor, Eubacterium, Streptococcus, Lactobacillus. Mycoplasma, Bacteroides, Flaviivola, Flavobacterium, Sphaerochaeta, Azospirillum, Gluconacetobacter, Neisseria, Roseburia, Parvibaculum, Staphylococcus, Nitratfractor, Mycoplasma and Campylobacter. Species of organism of such a genus can be as otherwise herein discussed.

[0496] Some methods of identifying orthologs of CRISPR-Cas system enzymes may involve identifying tracr sequences in genomes of interest. Identification of tracr sequences may relate to the following steps: Search for the direct repeats or tracr mate sequences in a database to identify a CRISPR region comprising a CRISPR enzyme. Search for homologous sequences in the CRISPR region flanking the CRISPR enzyme in both the sense and antisense directions. Look for transcriptional terminators and secondary structures. Identify any sequence that is not a direct repeat or a tracr mate sequence but has more than 50% identity to the direct repeat or tracr mate sequence as a potential tracr sequence. Take the potential tracr sequence and analyze for transcriptional terminator sequences associated therewith.

[0497] It will be appreciated that any of the functionalities described herein may be engineered into CRISPR enzymes from other orthologs, including chimeric enzymes comprising fragments from multiple orthologs. Examples of such orthologs are described elsewhere herein. Thus, chimeric enzymes may comprise fragments of CRISPR enzyme orthologs of an organism which includes but is not limited to Corynebacter, Sutterella, Legionella, Treponema, Filifactor, Eubacterium, Streptococcus, Lactobacillus, Mycoplasma, Bacteroides, Flavobacterium, Sphaerochaeta, Azospirillum, Gluconacetobacter, Neisseria, Roseburia, Parvibaculum, Staphylococcus, Nitratifractor, Mycoplasma and Campylobacter. A chimeric enzyme can comprise a first fragment and a second fragment, and the fragments can be of CRISPR enzyme orthologs of organisms of genuses herein mentioned or of species herein mentioned; advantageously the fragments are from CRISPR enzyme orthologs of different species.

[0498] In embodiments, the Type VI RNA-targeting effector protein, in particular the C2c2 protein as referred to herein also encompasses a functional variant of C2c2 or a homologue or an orthologue thereof. A “functional variant” of a protein as used herein refers to a variant of such protein which retains at least partially the activity of that protein. Functional variants may include mutants (which may be insertion, deletion, or replacement mutants), including polymorphs, etc. Also included within functional variants are fusion products of such protein with another, usually unrelated, nucleic acid, protein, polypeptide or peptide. Functional variants may be naturally occurring or may be man-made. Advantageous embodiments can involve engineered or non-naturally occurring Type VI RNA-targeting effector protein, e g., C2c1/C2c3 or an ortholog or homolog thereof.

[0499] In an embodiment, nucleic acid molecule(s) encoding the Type VI RNA-targeting effector protein, in particular C2c2 or an ortholog or homolog thereof, may be codon-optimized for expression in an eukaryotic cell. A eukaryote can be as herein discussed. Nucleic acid molecule(s) can be engineered or non-naturally occurring.

[0500] In an embodiment, the Type VI RNA-targeting effictor protein, in particular C2c2 or an ortholog or homolog thereof, may comprise one or more mutations (and hence nucleic acid molecule(s) coding for same may have mutation(s). The mutations may be artificially introduced mutations and may include but are not limited to one or more mutations in a catalytic domain. Examples of catalytic domains with reference to a Cas9 enzyme may include but are not limited to RuvC I, RuvC II, RuvC III and HNH domains.

[0501] In an embodiment, the Type VI protein such as C2c2 or an ortholog or homolog thereof, may comprise one or more mutations. The mutations may be artificially introduced mutations and may include but are not limited to one or more mutations in a catalytic domain. Examples of catalytic domains with reference to a Cas enzyme may include but are not limited to RuvC I, RuvC II, RuvC III, HNH domains, and HEPN domains.

[0502] In an embodiment, the Type VI protein such as C2c2 or an ortholog or homolog thereof, may be used as a generic nucleic acid binding protein with fusion to or being operably linked to a functional domain. Exemplary functional domains may include but are not limited to translational initiator, translational activator, translational repressor, nucleases, in particular ribonucleases, a spliceosome, beads, a light inducible/controllable domain or a chemically inducible/controllable domain.

[0503] In some embodiments, the unmodified nucleic acid-targeting effector protein may have cleavage activity. In some embodiments, the RNA-targeting effector protein may direct cleavage of one or both nucleic acid (DNA or RNA) strands at the location of or near a target sequence, such as within the target sequence and/or within the complement of the target sequence or at sequences associated with the target sequence. In some embodiments, the nucleic acid -targeting Cas protein may direct cleavage of one or both DNA or RNA strands within about 1, 2, 3, 4, 5, 6, 7, 8, 9, 10, 15, 20, 25, 50, 100, 200, 500, or more base pairs from the first or last nucleotide of a target sequence. In some embodiments, the cleavage may be blunt, i.e., generating blunt ends. In some embodiments, the cleavage may be staggered, i.e., generating sticky ends. In some embodiments, the cleavage may be a staggered cut with a 5′ overhang, e.g., a 5′ overhang of 1 to 5 nucleotides. In some embodiments, the cleavage may be a staggered cut with a 3′ overhang, e.g., a 3′ overhang of 1 to 5 nucleotides. In some embodiments, a vector encodes a nucleic acid-targeting Cas protein that may be mutated with respect to a corresponding wild-type enzyme such that the mutated nucleic acid-targeting Cas protein lacks the ability to cleave one or both DNA or RNA strands of a target polynucleotide containing a target sequence. As a further example, two or more catalytic domains of Cas (RuvC I, RuvC II, and RuvC III or the HNH domain, or HEPN domain) may be mutated to produce a mutated Cas substantially lacking all RNA cleavage activity. As described herein, corresponding catalytic domains of a C2c2 effector protein may also be mutated to produce a mutated C2c2 effector protein lacking all DNA cleavage activity or having substantially reduced DNA cleavage activity. In some embodiments, a nucleic acid -targeting effector protein may be considered to substantially lack all RNA cleavage activity when the RNA cleavage activity of the mutated enzyme is about no more than 25%, 10%, 5%, 1%, 0.1%, 0.01%, or less of the nucleic acid cleavage activity of the non-mutated form of the enzyme; an example can be when the nucleic acid cleavage activity of the mutated form is nil or negligible as compared with the non-mutated form. An effector protein may be identified with reference to the general class of enzymes that share homology to the biggest nuclease with multiple nuclease domains from the Type V/Type VI CRISPR system. Most preferably, the effector protein is a Type V/Type VI protein such as C2c2. By derived, Applicants mean that the derived enzyme is largely based, in the sense of having a high degree of sequence homology with, a wildtype enzyme, but that it has been mutated (modified) in some way as known in the art or as described herein.

[0504] Again, it will be appreciated that the terms Cas and CRISPR enzyme and CRISPR protein and Cas protein are generally used interchangeably and at all points of reference herein refer by analogy to novel CRISPR effector proteins further described in this application, unless otherwise apparent, such as by specific reference to Cas9. As mentioned above, many of the residue numberings used herein refer to the effector proteinfrom the Type V/Type VI CRISPR locus. However, it will be appreciated that this invention includes many more effector proteinsfrom other species of microbes. In certain embodiments, Cas may be constitutively present or inducibly present or conditionally present or administered or delivered. Cas optimization may be used to enhance function or to develop new functions, one can generate chimeric Cas proteins. And Cas may be used as a generic nucleic acid binding protein.

[0505] Typically, in the context of an endogenous nucleic acid-targeting system, formation of a nucleic acid-targeting complex (comprising a guide RNA hybridized to a target sequence and complexed with one or more nucleic acid-targeting effector proteins) results in cleavage of one or both DNA or RNA strands in or near (e.g., within 1, 2, 3, 4, 5, 6, 8, 9, 10, 20, 50, or more base pairs from) the target sequence. As used herein the term “sequence(s) associated with a target locus of interest” refers to sequences near the vicinity of the target sequence (e.g. within 1, 2, 3, 4, 5, 6, 9, 10, 20, 50, or more base pairs from the target sequence, wherein the target sequence is comprised within a target locus of interest).

[0506] An example of a codon optimized sequence, is in this instance a sequence optimized for expression in a eukaryote, e.g., humans (i.e. being optimized for expression in humans), or for another eukaryote, animal or mammal as herein discussed; see, e.g., SaCas9 human codon optimized sequence in WO 2014/093622 (PCT/US2013/074667) as an example of a codon optimized sequence (from knowledge in the art and this disclosure, codon optimizing coding nucleic acid molecule(s), especially as to effector protein (e.g., C2c2) is within the ambit of the skilled artisan). Whilst this is preferred, it will be appreciated that other examples are possible and codon optimization for a host species other than human, or for codon optimization for specific organs is known. In some embodiments, an enzyme coding sequence encoding a DNA/RNA-targeting Cas protein is codon optimized for expression in particular cells, such as eukaryotic cells. The eukaryotic cells may be those of or derived from a particular organism, such as a mammal, including but not limited to human, or non-human eukaryote or animal or mammal as herein discussed, e.g., mouse, rat, rabbit, dog, livestock, or non-human mammal or primate. in some embodiments, processes for modifying the germ line genetic identity of human beings and/or processes for modifying the genetic identity of animals which are likely to cause them suffering without any substantial medical benefit to man or animal, and also animals resulting from such processes, may be excluded. In general, codon optimization refers to a process of modifying a nucleic acid sequence for enhanced expression in the host cells of interest by replacing at least one codon (e.g., about or more than about 1, 2, 3, 4, 5, 10, 15, 20, 25, 50, or more codons) of the native sequence with codons that are more frequently or most frequently used in the genes of that host cell while maintaining the native amino acid sequence. Various species exhibit particular bias for certain codons of a particular amino acid. Codon bias (differences in codon usage between organisms) often correlates with the efficiency of translation of messenger RNA (mRNA), which is in turn believed to be dependent on, among other things, the properties of the codons being translated and the availability of particular transfer RNA (tRNA) molecules. The predominance of selected tRNAs in a cell is generally a reflection of the codons used most frequently in peptide synthesis. Accordingly, genes can be tailored for optimal gene expression in a given organism based on codon optimization. Codon usage tables are readily available, for example, at the “Codon Usage Database” available at www kazusa.orjp/codon/and these tables can be adapted in a number of ways. See Nakamura, Y., et al. “Codon usage tabulated from the international DNA sequence databases: status for the year 2000” Nucl. Acids Res. 28:292 (2000). Computer algorithms for codon optimizing a particular sequence for expression in a particular host cell are also available, such as Gene Forge (Aptagen; Jacobus, P A), are also available. In some embodiments, one or more codons (e.g., 1, 2, 4, 5, 10, 15, 20, 25, 50, or more, or all codons) in a sequence encoding a DNA/RNA-targeting Cas protein corresponds to the most frequently used codon for a particular amino acid.

[0507] In some embodiments, a vector encodes a nucleic acid-targeting effector protein such as the Type V RNA-targeting effector protein, in particular C2c2, or an ortholog or homolog thereof comprising one or more nuclear localization sequences (NLSs), such as about or more than about 1, 2, 3, 4, 5, 6, 7, 8, 9, 10, or more NLSs. In sonic embodiments, the RNA-targeting effector protein comprises about or more than about 1, 2, 3, 4, 5, 6, 7, 8, 9, 10, or more NLSs at or near the amino-terminus, about or more than about 1, 2, 3, 4, 5, 6, 7, 8, 9, 10, or more NLSs at or near the carboxy-terminus, or a combination of these (e.g., zero or at least one or more NLS at the amino-terminus and zero or at one or more NLS at the carboxy terminus). When more than one NLS is present, each may be selected independently of the others, such that a single NLS may be present in more than one copy and/or in combination with one or more other NLSs present in one or more copies. In some embodiments, an NLS is considered near the N- or C-terminus when the nearest amino acid of the NLS is within about 1, 2, 3, 4, 5, 10, 15, 20, 25, 30, 40, 50, or more amino acids along the polypeptide chain from the N- or C-terminus. Non-limiting examples of NLSs include an NLS sequence derived from: the NLS of the SV40 virus large T-antigen, having the amino acid sequence PKKKRKV (SEQ ID NO: 1); the NLS from nucleoplasmin (e.g., the nucleoplasmin bipartite NLS with the sequence KRPAATKKAGQAKKKK (SEQ ID NO: 2)); the c-myc NLS having the amino acid sequence PAAKRVKLD (SEQ ID NO: 3) or RQRRNELKRSP (SEQ ID NO: 4); the hRNPA1 M9 NLS having the sequence NQSSNFGPMKGGNFGGRSSGPYGGGGQYFAKPRNQGGY (SEQ ID NO: 5); the sequence RMRIZFKNKGKDTAELRRRRVEVSVELRKAKKDEQILKRRNV (SEQ ID NO: 6) of the IBB domain from importin-alpha; the sequences VSRKRPRP (SEQ ID NO: 7) and PPKKARED (SEQ ID NO: 8) of the myoma T protein; the sequence PQPKKKPL (SEQ ID NO: 9) of human p53; the sequence SALIKKKIKKMAP (SEQ ID NO: 10) of mouse c-abl IV; the sequences DRLRR (SEQ ID NO: 11) and PKQKKRK (SEQ ID NO: 12) of the influenza virus NS1; the sequence RKLKKKIKKL (SEQ ID NO: 13) of the Hepatitis virus delta antigen; the sequence REKKKFLKRR (SEQ ID NO: 14) of the mouse Mx1 protein; the sequence KRKGDEVDGVDEVAKKKSKK (SEQ ID NO: 15) of the human poly(ADP-ribose) polymerase; and the sequence RKCLQAGMNLEARKTKK (SEQ ID NO: 16) of the steroid hormone receptors (human) glucocorticoid. In general, the one or more NLSs are of sufficient strength to drive accumulation of the DNA/RNA-targeting Cas protein in a detectable amount in the nucleus of a eukaryotic cell. In general, strength of nuclear localization activity may derive from the number of NLSs in the nucleic acid-targeting effector protein, the particular NLS(s) used, or a combination of these factors, Detection of accumulation in the nucleus may be performed by any suitable technique. For example, a detectable marker may be fused to the nucleic acid-targeting protein, such that location within a cell may be visualized, such as in combination with a means for detecting the location of the nucleus (e.g., a stain specific for the nucleus such as DAPI). Cell nuclei may also be isolated from cells, the contents of which may then be analyzed by any suitable process for detecting protein, such as immunohistochemistry, Western blot, or enzyme activity assay. Accumulation in the nucleus may also be determined indirectly, such as by an assay for the effect of nucleic acid-targeting complex formation (e.g., assay for DNA or RNA cleavage or mutation at the target sequence, or assay for altered gene expression activity affected by DNA or RNA-targeting complex formation and/or DNA or RNA-targeting Cas protein activity), as compared to a control not exposed to the nucleic acid-targeting Cas protein or nucleic acid-targeting complex, or exposed to a nucleic acid-targeting Cas protein lacking the one or more NLSs. In preferred embodiments of the herein described C2c2 effector protein complexes and systems the codon optimized C2c2 effector proteins comprise an NLS attached to the C-terminal of the protein.

[0508] In some embodiments, one or more vectors driving expression of one or more elements of a nucleic acid-targeting system are introduced into a host cell such that expression of the elements of the nucleic acid-targeting system direct formation of a nucleic acid-targeting complex at one or more target sites. For example, a nucleic acid-targeting effector enzyme and a nucleic acid-targeting guide RNA could each be operably linked to separate regulatory elements on separate vectors. RNA(s) of the nucleic acid-targeting system can be delivered to a transgenic nucleic acid-targeting effector proteinanimal or mammal, e.g., an animal or mammal that constitutively or inducibly or conditionally expresses nucleic acid-targeting effector protein; or an animal or mammal that is otherwise expressing nucleic acid-targeting effector proteinor has cells containing nucleic acid-targeting effector protein, such as by way of prior administration thereto of a vector or vectors that code for and express in vivo nucleic acid-targeting effector protein. Alternatively, two or more of the elements expressed from the same or different regulatory elements, may be combined in a single vector, with one or more additional vectors providing any components of the nucleic acid-targeting system not included in the first vector. nucleic acid-targeting system elements that are combined in a single vector may be arranged in any suitable orientation, such as one element located 5′ with respect to (“upstream” of) or 3′ with respect to (“downstream” of) a second element. The coding sequence of one element may be located on the same or opposite strand of the coding sequence of a second element, and oriented in the same or opposite direction. In some embodiments, a single promoter drives expression of a transcript encoding a nucleic acid-targeting effector protein and the nucleic acid-targeting guide RNA, embedded within one or more intron sequences (e.g., each in a different intron, two or more in at least one intron, or all in a single intron). In some embodiments, the nucleic acid-targeting effector protein and the nucleic acid-targeting guide RNA may be operably linked to and expressed from the same promoter. Delivery vehicles, vectors, particles, nanoparticles, formulations and components thereof for expression of one or more elements of a nucleic acid-targeting system are as used in the foregoing documents, such as WO 2014/093622 (PCT/US2013/074667). In some embodiments, a vector comprises one or more insertion sites, such as a restriction endonuclease recognition sequence (also referred to as a “cloning site”). In some embodiments, one or more insertion sites (e.g., about or more than about 1, 2, 3, 4, 5, 6, 7, 8, 9, 10, or more insertion sites) are located upstream and/or downstream of one or more sequence elements of one or more vectors. In some embodiments, a vector comprises two or more insertion sites, so as to allow insertion of a guide sequence at each site. In such an arrangement, the two or more guide sequences may comprise two or more copies of a single guide sequence, two or more different guide sequences, or combinations of these. When multiple different guide sequences are used, a single expression construct may be used to target nucleic acid-targeting activity to multiple different, corresponding target sequences within a cell. For example, a single vector may comprise about or more than about 1, 2, 3, 4, 5, 6, 7. 8, 9, 10, 15, 20, or more guide sequences. In some embodiments, about or more than about 1, 2, 3, 4, 5, 6, 7, 8, 9, 10, or more such guide-sequence-containing vectors may be provided, and optionally delivered to a cell. In some embodiments, a vector comprises a regulatory element operably linked to an enzyme-coding sequence encoding a a nucleic acid-targeting effector protein. nucleic acid-targeting effector protein or nucleic acid-targeting guide RNA or RNA(s) can be delivered separately; and advantageously at least one of these is delivered via a particle or nanoparticle complex, nucleic acid-targeting effector protein mRNA can be delivered prior to the nucleic acid-targeting guide RNA to give time for nucleic acid-targeting effector protein to be expressed. nucleic acid-targeting effector protein mRNA might be administered 1-12 hours (preferably around 2-6 hours) prior to the administration of nucleic acid-targeting guide RNA. Alternatively, nucleic acid-targeting effector protein mRNA and nucleic acid-targeting guide RNA can be administered together. Advantageously, a second booster dose of guide RNA can be administered 1-12 hours (preferably around 2-6 hours) after the initial administration of nucleic acid-targeting effector protein mRNA+guide RNA. Additional administrations of nucleic acid-targeting effector protein mRNA and/or guide RNA might be useful to achieve the most efficient levels of genome and/or transcriptome modification.

[0509] In one aspect, the invention provides methods for using one or more elements of a nucleic acid-targeting system. The nucleic acid-targeting complex of the invention provides an effective means for modifying a target DNA or RNA single or double stranded, linear or super-coiled). The nucleic acid-targeting complex of the invention has a wide variety of utility including modifying (e.g., deleting, inserting, translocating, inactivating, activating) a target DNA or RNA in a multiplicity of cell types. As such the nucleic acid-targeting complex of the invention has a broad spectrum of applications in, e.g., gene therapy, drug screening, disease diagnosis, and prognosis. An exemplary nucleic acid-targeting complex comprises a DNA or RNA-targeting effector protein complexed with a guide RNA hybridized to a target sequence within the target locus of interest.

[0510] In one embodiment, this invention provides a method of cleaving a target RNA. The method may comprise modifying a target RNA using a nucleic acid-targeting complex that binds to the target RNA and effect cleavage of said target RNA. In an embodiment, the nucleic acid-targeting complex of the invention, when introduced into a cell, may create a break (e.g., a single or a double strand break) in the RNA sequence. For example, the method can be used to cleave a disease RNA in a cell For example, an exogenous RNA template comprising a sequence to be integrated flanked by an upstream sequence and a downstream sequence may be introduced into a cell. The upstream and downstream sequences share sequence similarity with either side of the site of integration in the RNA. Where desired, a donor RNA can be mRNA. The exogenous RNA template comprises a sequence to be integrated (e.g., a mutated RNA). The sequence for integration may be a sequence endogenous or exogenous to the cell. Examples of a sequence to be integrated include RNA encoding a protein or a non-coding RNA (e.g., a microRNA). Thus, the sequence for integration may be operably linked to an appropriate control sequence or sequences. Alternatively, the sequence to be integrated may provide a regulatory function. The upstream and downstream sequences in the exogenous RNA template are selected to promote recombination between the RNA sequence of interest and the donor RNA. The upstream sequence is a RNA sequence that shares sequence similarity with the RNA sequence upstream of the targeted site for integration. Similarly, the downstream sequence is a RNA sequence that shares sequence similarity with the RNA sequence downstream of the targeted site of integration. The upstream and downstream sequences in the exogenous RNA template can have 75%, 80%, 85%, 90%, 95%, or 100% sequence identity with the targeted RNA sequence. Preferably, the upstream and downstream sequences in the exogenous RNA template have about 95%, 96%, 97%, 98%, 99%, or 100% sequence identity with the targeted RNA sequence. In some methods, the upstream and downstream sequences in the exogenous RNA template have about 99% or 100% sequence identity with the targeted RNA sequence. An upstream or downstream sequence may comprise from about 20 bp to about 2500 bp, for example, about 50, 100, 200, 300, 400, 500, 600, 700, 800, 900, 1000, 1100, 1200, 1300, 1400, 1500, 1600, 1700, 1800, 1900, 2000, 2100, 2200, 2300, 2400, or 2500 bp. In some methods, the exemplary upstream or downstream sequence have about 200 by to about 2000 bp, about 600 bp to about 1000 bp, or more particularly about 700 bp to about 1000 bp. In some methods, the exogenous RNA template may further comprise a marker. Such a marker may make it easy to screen for targeted integrations. Examples of suitable markers include restriction sites, fluorescent proteins, or selectable markers. The exogenous RNA template of the invention can be constructed using recombinant techniques (see, for example, Sambrook et al., 2001 and Ausubel et al., 1996). In a method for modifying a target RNA by integrating an exogenous RNA template, a break (e.g., double or single stranded break in double or single stranded DNA or RNA) is introduced into the DNA or RNA sequence by the nucleic acid-targeting complex, the break is repaired via homologous recombination with an exogenous RNA template such that the template is integrated into the RNA target. The presence of a double-stranded break facilitates integration of the template. In other embodiments, this invention provides a method of modifying expression of a RNA in a eukaryotic cell. The method comprises increasing or decreasing expression of a target polynucleotide by using a nucleic acid-targeting complex that binds to the DNA or RNA (e.g., mRNA or pre-mRNA). In some methods, a target RNA can be inactivated to effect the modification of the expression in a cell. For example, upon the binding of a RNA-targeting complex to a target sequence in a cell, the target RNA is inactivated such that the sequence is not translated, the coded protein is not produced, or the sequence does not function as the wild-type sequence does. For example, a protein or microRNA coding sequence may be inactivated such that the protein or microRNA or pre-microRNA transcript is not produced. The target RNA of a RNA-targeting complex can be any RNA endogenous or exogenous to the eukaryotic cell. For example, the target RNA can be a RNA residing in the nucleus of the eukaryotic cell. The target RNA can be a sequence (e.g., mRNA or pre-mRNA) coding a gene product (e.g., a protein) or a non-coding sequence (e.g., ncRNA, lncRNA, tRNA, or rRNA). Examples of target RNA include a sequence associated with a signaling biochemical pathway, e.g., a signaling biochemical pathway-associated RNA. Examples of target RNA include a disease associated RNA, A “disease-associated” RNA refers to any RNA which is yielding translation products at an abnormal level or in an abnormal form in cells derived from a disease-affected tissues compared with tissues or cells of a non disease control. It may be a RNA transcribed from a gene that becomes expressed at an abnormally high level; it may be a RNA transcribed from a gene that becomes expressed at an abnormally low level, where the altered expression correlates with the occurrence and/or progression of the disease. A disease-associated RNA also refers to a RNA transcribed from a gene possessing mutations) or genetic variation that is directly responsible or is in linkage disequilibrium with a gene(s) that is responsible for the etiology of a disease. The translated products may be known or unknown, and may be at a normal or abnormal level. The target RNA of a RNA-targeting complex can be any RNA endogenous or exogenous to the eukaryotic cell. For example, the target RNA can be a RNA residing in the nucleus of the eukaryotic cell. The target RNA can be a sequence (e.g., mRNA or pre-mRNA) coding a gene product (e.g., a protein) or a non-coding sequence (e.g., ncRNA, lncRNA, tRNA, or rRNA).

[0511] In some embodiments, the method may comprise allowing a nucleic acid-targeting complex to bind to the target DNA or RNA to effect cleavage of said target DNA or RNA thereby modifying the target DNA or RNA, wherein the nucleic acid-targeting complex comprises a nucleic acid-targeting effector protein complexed with a guide RNA hybridized to a target sequence within said target DNA or RNA. In one aspect, the invention provides a method of modifying expression of DNA or RNA in a eukaryotic cell. In some embodiments, the method comprises allowing a nucleic acid-targeting complex to bind to the DNA or RNA such that said binding results in increased or decreased expression of said DNA or RNA; wherein the nucleic acid-targeting complex comprises a nucleic acid-targeting effector protein complexed. with a guide RNA. Similar considerations and conditions apply as above for methods of modifying a target DNA or RNA. In fact, these sampling, culturing and re-introduction options apply across the aspects of the present invention. In one aspect, the invention provides for methods of modifying a target DNA or RNA in a eukaryotic cell, which may be in vivo, ex vivo or in vitro. In some embodiments, the method comprises sampling a cell or population of cells from a human or non-human animal, and modifying the cell or cells. Culturing may occur at any stage ex vivo. The cell or cells may even be re-introduced into the non-human animal or plant. For re-introduced cells it is particularly preferred that the cells are stern cells.

[0512] Indeed, in any aspect of the invention, the nucleic acid-targeting complex may comprise a nucleic acid-targeting effector protein complexed with a guide RNA hybridized to a target sequence.

[0513] The invention relates to the engineering and optimization of systems, methods and compositions used for the control of gene expression involving DNA or RNA sequence targeting, that relate to the nucleic acid-targeting system and components thereof. In advantageous embodiments, the effector proteinenzyme is a Type VI protein such as C2c2. An advantage of the present methods is that the CRISPR system minimizes or avoids off-target binding and its resulting side effects. This is achieved using systems arranged to have a high degree of sequence specificity for the target DNA or RNA.

[0514] In relation to a nucleic acid-targeting complex or system preferably, the tracr sequence has one or more hairpins and is 30 or more nucleotides in length, 40 or more nucleotides in length, or 50 or more nucleotides in length; the crRNA sequence is between 10 to 30 nucleotides in length, the nucleic acid-targeting effector protein is a Type VI effector protein.

[0515] In certain embodiments, the effector protein may be a Listeria sp. C2c2p, preferably Listeria seeligeria C2c2p, more preferably Listeria seeligeria serovar 1/2b str. SLCC3954 C2c2p and the crRNA sequence may be 44 to 47 nucleotides in length, with a 5′ 29-nt direct repeat (DR) and a 15-nt to 18-nt spacer.

[0516] In certain embodiments, the effector protein may be a Leptotrichia sp. C2c2p, preferably Leptotrichia shahii C2c2p, more preferably Leptotrichia shahii DSM 19757 C2c2p and the crRNA sequence may be 42 to 58 nucleotides in length, with a 5′direct repeat of at least 24 nt, such as a 5′ 24-28-nt direct repeat (DR) and a spacer of at least 14 nt, such as a 14-nt to 28-nt spacer, or a spacer of at least 18 nt, such as 19, 20, 21, 22, or more nt, such as 18-28, 19-28, 20-28, 21-28, or 22-28 nt.

[0517] In certain embodiments, the effector protein may be a Type VI loci effector protein, more particularly a C2c2p, and the crRNA sequence may be 36 to 63 nucleotides in length, preferably 37-nt to 62-nt in length, or 38-nt to 61-nt in length, or 39-nt to 60-nt in length, more preferably 40-nt to 59-nt in length, or 41-nt to 58-nt in length, most preferably 42-nt to 57-nt in length. For example, the crRNA may comprise, consist essentially of or consist of a direct repeat (DR), preferably a 5′ DR, 26-nt to 31-nt in length, preferably 27-nt to 30-nt in length, even more preferably 28-nt or 29-nt in length or at least 28 or 29 nt in length, and a spacer 10-nt to 32-nt in length, preferably 11-nt to 31-nt in length, more preferably 12-nt to 30-nt in length, even more preferably 13-nt to 29-nt in length, and most preferably 14-nt to 28-nt in length, such as 18-28 nt, 19-28 nt, 20-28 nt, 21-28 nt, or 22-28 nt.

[0518] In certain embodiments, the effector protein may be a Type VI loci effector protein, more particularly a C2c2p, and the tracrRNA sequence may be at least 60-nt long, such as at least 65-nt in length, or at least 70-nt in length, such as from 60-nt to 70-nt in length, or from 60-nt to 70-nt in length, or from 70-nt to 80-nt in length, or from 80-nt to 90-nt in length, or from 90-nt to 100-nt in length, or from 100-nt to 110-nt in length, or from 110-nt to 120-nt in length, or from 120-nt to 130-nt in length, or from 130-nt to 140-nt in length, or from 140-nt to 150-nt in length, or more than 150-nt in length. See illustrative examples in FIG. 22-37.

[0519] In certain embodiments, the effector protein may be a Type VI loci effector protein, more particularly a C2c2p, and no tracrRNA may be required for cleavage.

[0520] The use of two different aptamers (each associated with a distinct nucleic acid-targeting guide RNAs) allows an activator-adaptor protein fusion and a repressor-adaptor protein fusion to be used, with different nucleic acid-targeting guide RNAs, to activate expression of one DNA or RNA, whilst repressing another. They, along with their different guide RNAs can be administered together, or substantially together, in a multiplexed approach. A large number of such modified nucleic acid-targeting guide RNAs can be used all at the same time, for example 10 or 20 or 30 and so forth, whilst only one (or at least a minimal number) of effector protein molecules need to be delivered, as a comparatively small number of effector protein molecules can be used with a large number modified guides. The adaptor protein may be associated (preferably linked or fused to) one or more activators or one or more repressors. For example, the adaptor protein may be associated with a first activator and a second activator. The first and second activators may be the same, but they are preferably different activators. Three or more or even four or more activators (or repressors) may be used, but package size may limit the number being higher than 5 different functional domains. Linkers are preferably used, over a direct fusion to the adaptor protein, where two or more functional domains are associated with the adaptor protein. Suitable linkers might include the Gly Ser linker.

[0521] It is also envisaged that the nucleic acid-targeting effector protein-guide RNA complex as a whole may be associated with two or more functional domains. For example, there may be two or more functional domains associated with the nucleic acid-targeting effector protein, or there may be two or more functional domains associated with the guide RNA (via one or more adaptor proteins), or there may be one or more functional domains associated with the nucleic acid-targeting effector protein and one or more functional domains associated with the guide RNA (via one or more adaptor proteins).

[0522] The fusion between the adaptor protein and the activator or repressor may include a linker. For example, GlySer linkers GGGS (SEQ ID NO: 18) can be used. They can be used in repeats of 3 ((GGGGS)₃ (SEQ ID NO: 19)) or 6, 9 or even 12 (SEQ ID NOS 20-22, respectively) or more, to provide suitable lengths, as required. Linkers can be used between the guide RNAs and the functional domain (activator or repressor), or between the nucleic acid-targeting effector protein and the functional domain (activator or repressor). The linkers the user to engineer appropriate amounts of “mechanical flexibility”.

[0523] The invention comprehends a nucleic acid-targeting complex comprising a nucleic acid-targeting effector protein and a guide :RNA, wherein the nucleic acid-targeting effector protein comprises at least one mutation, such that the nucleic acid-targeting Cas protein has no more than 5% of the activity of the nucleic acid-targeting Cas protein not having the at least one mutation and, optionally, at least one or more nuclear localization sequences; the guide RNA comprises a guide sequence capable of hybridizing to a target sequence in a RNA of interest in a cell; and wherein: the nucleic acid-targeting effector protein is associated with two or more functional domains; or at least one loop of the guide RNA is modified by the insertion of distinct RNA sequence(s) that bind to one or more adaptor proteins, and wherein the adaptor protein is associated with two or more functional domains; or the nucleic acid-targeting effector protein is associated with one or more functional domains and at least one loop of the guide RNA is modified by the insertion of distinct RNA sequence(s) that bind to one or more adaptor proteins, and wherein the adaptor protein is associated with one or more functional domains.

### Delivery Generally

### C2c2 Effector Protein Complexes Can Deliver Functional Effectors

[0524] Unlike CRISPR-Cas-mediated gene knockout, which permanently eliminates expression by mutating the gene at the DNA level, CRISPR-Cas knockdown allows for temporary reduction of gene expression through the use of artificial transcription or translation factors. Mutating key residues in both DNA or RNA cleavage domains of the C2c2 protein results in the generation of a catalytically inactive C2c2. A catalytically inactive C2c2 complexes with a guide RNA and localizes to the DNA or RNA sequence specified by that guide RNA's targeting domain, however, it does not cleave the target DNA or RNA. Fusion of the inactive C2c2 protein to an effector domain, e.g., a transcription or translation repression domain, enables recruitment of the effector to any DNA or RNA site specified by the guide RNA. In certain embodiments, C2c2 may be fused to a transcriptional repression domain and recruited to the promoter region of a gene. Especially for gene repression, it is contemplated herein that blocking the binding site of an endogenous transcription factor would aid in downregulating gene expression. In another embodiment, an inactive C2c2 can be fused to a chromatin modifying protein. Altering chromatin status can result in decreased expression of the target gene. In further embodiments, C2c2 may be fused to a translation repression domain.

[0525] In an embodiment, a guide RNA molecule can be targeted to a known transcription response elements (e.g., promoters, enhancers, etc.), a known upstream activating sequences, and/or sequences of unknown or known function that are suspected of being able to control expression of the target DNA.

[0526] In some methods, a target polynucleotide can be inactivated to effect the modification of the expression in a cell. For example, upon the binding of a CRISPR complex to a target sequence in a cell, the target polynucleotide is inactivated such that the sequence is not transcribed, the coded protein is not produced, or the sequence does not function as the wild-type sequence does. For example, a protein or microRNA coding sequence may be inactivated such that the protein is not produced. In some methods, a target polynucleotide can be inactivated to effect the modification of the expression in a cell. For example, upon the binding of a CRISPR complex to an RNA target sequence in a cell, the target polynucleotide is inactivated such that the sequence is not translated, affecting the expression level of the protein in the cell.

[0527] In particular embodiments, the CRISPR enzyme comprises one or more mutations selected from the group consisting of R597A, R1278A and H1283A and/or the one or more mutations are in the HEPN domain of the CRISPR enzyme or is a mutation as otherwise discussed herein. In some embodiments, the CRISPR enzyme has one or more mutations in a catalytic domain, wherein when transcribed, the direct repeat sequence forms a single stem loop and the guide sequence directs sequence-specific binding of a CRISPR complex to the target sequence, and wherein the enzyme further comprises a functional domain. In some embodiments, the functional domain is a . In some embodiments, the functional domain is a transcription repression domain, preferably KRAB. In some embodiments, the transcription repression domain is SID, or concatemers of SID (eg SID4X). In some embodiments, the functional domain is an epigenetic modifying domain, such that an epigenetic modifying enzyme is provided. In some embodiments, the functional domain is an activation domain, which may be the P65 activation domain.

### Delivery of the C2c2 Effector Protein Complex or Components Thereof

[0528] Through this disclosure and the knowledge in the art, TALEs, CRISPR-Cas systems, or components thereof or nucleic acid molecules thereof or nucleic acid molecules encoding or providing components thereof may be delivered by a delivery system herein described both generally and in detail.

[0529] Vector delivery, e.g., plasmid, viral delivery: The CRISPR enzyme , for instance a Type V protein such as C2c2, and/or any of the present RNAs, for instance a guide RNA, can be delivered using any suitable vector, e.g., plasmid or viral vectors, such as adeno associated virus (AAV), lentivirus, adenovirus or other viral vector types, or combinations thereof. Effector proteins and one or more guide RNAs can be packaged into one or more vectors, e.g., plasmid or viral vectors. In some embodiments, the vector, e.g., plasmid or viral vector is delivered to the tissue of interest by, for example, an intramuscular injection, while other times the delivery is via intravenous, transdermal, intranasal, oral, mucosal, or other delivery methods. Such delivery may be either via a single dose, or multiple doses. One skilled in the art understands that the actual dosage to be delivered herein may vary greatly depending upon a variety of factors, such as the vector choice, the target cell, organism, or tissue, the general condition of the subject to be treated, the degree of transformation/modification sought, the administration route, the administration mode, the type of tra.nsformation/modification sought, etc.

[0530] Such a dosage may further contain, for example, a carrier (water, saline, ethanol, glycerol, lactose, sucrose, calcium phosphate, gelatin, dextran, agar, pectin, peanut oil, sesame oil, etc.), a diluent, a pharmaceutically-acceptable carrier (e.g., phosphate-buffered saline), a pharmaceutically-acceptable excipient, and/or other compounds known in the art. The dosage may further contain one or more pharmaceutically acceptable salts such as, for example, a mineral acid salt such as a hydrochloride, a hydrobromide, a phosphate, a sulfate, etc.; and the salts of organic acids such as acetates, propionates, malonates, benzoates, etc. Additionally, auxiliary substances, such as wetting or emulsifying agents, pH buffering substances, gels or gelling materials, flavorings, colorants, microspheres, polymers, suspension agents, etc. may also be present herein. In addition, one or more other conventional pharmaceutical ingredients, such as preservatives, humectants, suspending agents, surfactants, antioxidants, anticaking agents, chelating agents, coating agents, chemical stabilizers, etc. may also be present, especially if the dosage form is a reconstitutable form. Suitable exemplary ingredients include microcrystalline cellulose, carboxymethylcellulose sodium, polysorbate 80, phenylethyl alcohol, chlorobutanol, potassium sorbate, sorbic acid, sulfur dioxide, propyl gallate, the parabens, ethyl vanillin, glycerin, phenol, parachlorophenol, gelatin, albumin and a combination thereof. A thorough discussion of pharmaceutically acceptable excipients is available in REMINGTON'S PHARMACEUTICAL SCIENCES (Mack Pub. Co., N.J. 1991) which is incorporated by reference herein.

[0531] In an embodiment herein the delivery is via an adenovirus, which may be at a single booster dose containing at least 1×10⁵ particles (also referred to as particle units, pu) of adenoviral vector. In an embodiment herein, the dose preferably is at least about 1×10⁶ particles (for example, about 1×10⁶-1×10¹² particles), more preferably at least about 1×10⁷ particles, more preferably at least about 1×10⁸ particles (e.g., about 1×10⁸-1×10¹¹ particles or about 1×10⁸-1×10¹² particles), and most preferably at least about 1×10⁰ particles (e.g., about 1×10⁹-1×10¹⁰ particles or about 1×10⁹-1×10¹¹ particles^{.}), or even at least about 1×10¹⁰ particles (e.g., about 1×10¹⁰-1×10¹² particles) of the adenoviral vector. Alternatively, the dose comprises no more than about 1×10¹⁴ particles, preferably no more than about 1×10¹³ particles, even more preferably no more than about 1×10¹² particles, even more preferably no more than about 1×10¹¹ particles, and most preferably no more than about 1×10¹⁰ particles (e.g., no more than about 1×10⁹ articles). Thus, the dose may contain a single dose of adenoviral vector with, for example, about 1×10⁶ particle units (pu), about 2×10⁶ pu, about 4×10⁶ pu, about 1×10⁷ pu, about 2×10⁷ pu, about 4×10⁷ pu, about 1×10⁸ pu, about 2×10⁸ pu, about 4×10⁸ pu, about 1×10⁹ pu, about 2×10⁹ pu, about 4×10⁹ pu, about 1×10¹⁰ pu, about 2×10¹⁰ pu, about 4×10¹⁰ pu, about 1×10¹¹ pu, about 2×10¹¹ pu, about 4×10¹¹ pu, about 1×10¹² pu, about 2×10¹² pu, or about 4×10¹² pu of adenoviral vector. See, for example, the adenoviral vectors in U.S. Pat. No. 8,454,972 B2 to Nabel, et. al., granted on Jun. 4, 2013; incorporated by reference herein, and the dosages at col 29, lines 36-58 thereof. In an embodiment herein, the adenovirus is delivered via multiple doses.

[0532] In an embodiment herein, the delivery is via an AAV. A therapeutically effective dosage for in vivo delivery of the AAV to a human is believed to be in the range of from about 20 to about 50 ml of saline solution containing from about 1×10¹⁰ to about 1×10¹⁰ functional AAV/ml solution. The dosage may be adjusted to balance the therapeutic benefit against any side effects. In an embodiment herein, the AAV dose is generally in the range of concentrations of from about 1×10⁵ to 1×10⁵⁰ genomes AAV, from about 1×10⁸ to 1×10²⁰ genomes AAV, from about 1×10¹⁰ to about 1×10¹⁶ genomes, or about 1×10¹¹ to about 1×10¹⁶ genomes AAV. A human dosage may be about 1×10¹³ genomes AAV. Such concentrations may be delivered in from about 0.001 ml to about 100 ml, about 0.05 to about 50 ml, or about 10 to about 25 ml of a carrier solution. Other effective dosages can be readily established by one of ordinary skill in the art through routine trials establishing dose response curves. See, for example, U.S. Pat. No. 8,404,658 B2 to Hajjar, et al., granted on Mar. 26, 2013, at col. 27, lines 45-60.

[0533] In an embodiment herein the delivery is via a plasmid. In such plasmid compositions, the dosage should be a sufficient amount of plasmid to elicit a response. For instance, suitable quantities of plasmid DNA in plasmid compositions can be from about 0.1 to about 2 mg, or from about 1 μg to about 10 μg per 70 kg individual. Plasmids of the invention will generally comprise (i) a promoter; (ii) a sequence encoding an nucleic acid-targeting CRISPR enzyme, operably linked to said promoter; (iii) a selectable marker; (iv) an origin of replication; and (v) a transcription terminator downstream of and operably linked to (ii). The plasmid can also encode the RNA components of a CRISPR complex, but one or more of these may instead be encoded on a different vector.

[0534] The doses herein are based on an average 70 kg individual. The frequency of administration is within the ambit of the medical or veterinary practitioner (e.g., physician, veterinarian), or scientist skilled in the art. It is also noted that mice used in experiments are typically about 20g and from mice experiments one can scale up to a 70 kg individual.

[0535] In some embodiments the RNA molecules of the invention are delivered in liposome or lipofectin formulations and the like and can be prepared by methods well known to those skilled in the art. Such methods are described, for example, in U.S. Pat. Nos. 5,593,972, 5,589,466, and 5,580,859, which are herein incorporated by reference. Delivery systems aimed specifically at the enhanced and improved delivery of siRNA into mammalian cells have been developed, (see, for example, Shen et al FEBS Let. 2003, 539:111-114; Xia et al., Nat. Biotech. 2002, 20:1006-1010; Reich et al., Mol. Vision. 2003, 9: 210-216; Sorensen et al., J. Mol. Biol. 2003, 327: 761-766; Lewis et al., Nat. Gen. 2002, 32: 107-108 and Simeoni et al,, NAR 2003, 31, 11: 2717-2724) and may be applied to the present invention. siRNA has recently been successfully used for inhibition of gene expression in primates for example. Tolentino et al., Retina 24(4):660 which may also be applied to the present invention.

[0536] Indeed, RNA delivery is a useful method of in vivo delivery. It is possible to deliver nucleic acid-targeting Cas proteinCas9 and guide RNAgRNA (and, for instance, HR repair template) into cells using liposomes or particles. Thus delivery of the nucleic acid-targeting Cas protein/CRISPR enzyme, such as a CasCas9 and/or delivery of the guide RNAs of the invention may be in RNA form and via microvesicles, liposomes or particles. For example, Cas mRNA and guide RNA can be packaged into liposomal particles for delivery in vivo. Liposomal transfection reagents such as lipofectamine from Life Technologies and other reagents on the market can effectively deliver RNA molecules into the liver.

[0537] Means of delivery of RNA also preferred include delivery of RNA via nanoparticles (Cho, S., Goldberg, M., Son, S., Xu, Q., Yang, F., Mei, Y., Bogatyrev, S., Langer, R. and Anderson, D., Lipid-like nanoparticles for small interfering RNA delivery to endothelial cells, Advanced. Functional Materials, 19: 3112-3118, 2010) or exosomes (Schroeder, A., Levins, C., Cortez, G, Langer, R., and Anderson, D., Lipid-based nanotherapeutics for siRNA delivery, Journal of Internal Medicine, 267: 9-21, 2010, PMID: 20059641). Indeed, exosomes have been shown to be particularly useful in delivery siRNA, a system with some parallels to the RNA-targeting system. For instance, El-Andaloussi S, et al. (“Exosome-mediated delivery of siRNA in vitro and in vivo.” Nat Protoc, 2012 December; 7(12):2112-26. doi: 10.1038/nprot.2012.131. Epub 2012 Nov. 15.) describe how exosomes are promising tools for drug delivery across different biological barriers and can be harnessed for delivery of siRNA in vitro and in vivo. Their approach is to generate targeted exosomes through transfection of an expression vector, comprising an exosomal protein fused with a peptide ligand. The exosomes are then purify and characterized from transfected cell supernatant, then RNA is loaded into the exosomes. Delivery or administration according to the invention can be performed with exosomes, in particular but not limited to the brain. Vitamin E (a-tocopherol) may be conjugated with nucleic acid-targeting Cas protein and delivered to the brain along with high density lipoprotein (HDL), for example in a similar manner as was done by Uno et al. (HUMAN GENE THERAPY 22:711-719 (June 2011)) for delivering short-interfering RNA (siRNA) to the brain. Mice were infused via Osmotic minipumps (model 1007D; Alzet, Cupertino, Calif.) filled with phosphate-buffered saline (PBS) or free TocsiBACE or Tac-siBACE/HDL and connected with Brain Infusion Kit 3 (Alzet). A brain-infusion cannula was placed about 0.5 mm posterior to the bregma at midline for infusion into the dorsal third ventricle. Uno et al. found that as little as 3 nmol of Toc-siRNA with HDL could induce a target reduction in comparable degree by the same ICV infusion method. A similar dosage of nucleic acid-targeting effector protein conjugated to a-tocopherol and co-administered with HDL targeted to the brain may be contemplated for humans in the present invention, for example, about 3 nmol to about 3 μmol of nucleic acid-targeting effector protein targeted to the brain may be contemplated. Zou et al. ((HUMAN GENE THERAPY 22:465-475 (April 2011)) describes a method of lentiviral-mediated delivery of short-hairpin RNAs targeting PKC; for in vivo gene silencing in the spinal cord of rats. Zou et al. administered about 10 μl of a recombinant lentivirus having a titer of 1×10⁹ transducing units (TU)/ml by an intrathecal catheter. A similar dosage of nucleic acid-targeting effector protein expressed in a lentiviral vector targeted to the brain may be contemplated for humans in the present invention, for example, about 10-50 ml of nucleic acid-targeting effector protein targeted to the brain in a lentivirus having a titer of 1×10⁹ transducing units CM/ml may be contemplated.

[0538] In terms of local delivery to the brain, this can be achieved in various ways. For instance, material can be delivered intrastriatally e.g., by injection. Injection can be performed stereotactically via a craniotomy.

[0539] Enhancing NHEJ or HR efficiency is also helpful for delivery. It is preferred that NHEJ efficiency is enhanced by co-expressing end-processing enzymes such as Trex2 (Dumitrache et al. Genetics. 2011 August; 188(4): 787-797). It is preferred that HR efficiency is increased by transiently inhibiting NHEJ machineries such as Ku70 and Ku86. HR efficiency can also be increased by co-expressing prokaryotic or eukaryotic homologous recombination enzymes such as RecBCD, RecA.

### Packaging and Promoters Generally

[0540] Ways to package nucleic acid-targeting effector protein (such as a Type V protein such as C2c2) coding nucleic acid molecules, e.g., DNA, into vectors, e.g., viral vectors, to mediate genome modification in vivo include:

[0541] To achieve NHEJ-mediated gene knockout:

[0542] Single virus vector:
[0543] Vector containing two or more expression cassettes:
[0544] Promoter-nucleic acid-targeting effector protein coding nucleic acid molecule-terminator
[0545] Promoter—guide RNAI -terminator
[0546] Promoter—guide RNA (N)-terminator (up to size limit of vector)

[0547] Double virus vector:
[0548] Vector 1 containing one expression cassette for driving the expression of nucleic acid-targeting effector protein (such as a Type V protein such as C2c2)
[0549] Promoter—nucleic acid-targeting effector protein coding nucleic acid molecule-terminator
[0550] Vector 2 containing one more expression cassettes for driving the expression of one or more guideRNAs
[0551] Promoter—guide RNAI -terminator
[0552] Promoter—guide RNAI (N)-terminator (up to size limit of vector)

[0553] To mediate homology-directed repair.
[0554] In addition to the single and double virus vector approaches described above, an additional vector is used to deliver a homology-direct repair template.

[0555] The promoter used to drive nucleic acid-targeting effector protein (such as a Type V protein such as C2c2) coding nucleic acid molecule expression can include:

[0556] AAV ITR can serve as a promoter: this is advantageous for eliminating the need for an additional promoter element (which can take up space in the vector). The additional space freed up can be used to drive the expression of additional elements (gRNA, etc.). Also, ITR activity is relatively weaker, so can be used to reduce potential toxicity due to over expression of nucleic acid-targeting effector protein (such as a Type V protein such as C2c2).

[0557] For ubiquitous expression, can use promoters: CMV, CAG, CBh, PGK, SV40, Fenian heavy or light chains, etc.

[0558] For brain or other CNS expression, can use promoters: SynapsinI for all neurons, CaMKIIalpha for excitatory neurons, GAD67 or GAD65 or VGAT for GABAergic neurons, etc.

[0559] For liver expression, can use Albumin promoter.

[0560] For lung expression, can use SP-B.

[0561] For endothelial cells, can use ICAM.

[0562] For hematopoietic cells can use IFNbeta or CD45.

[0563] For Osteoblasts can use OG-2.

[0564] The promoter used to drive guide RNA can include:

[0565] Pol IlI promoters such as U6 or H1

[0566] Use of Pol II promoter and intronic cassettes to express guide RNA

### Adeno Associated Virus (AAV)

[0567] nucleic acid-targeting effector protein (such as a Type V protein such as C2c2) and one or more guide RNA can be delivered using adeno associated virus (AAV), lentivirus, adenovirus or other plasmid or viral vector types, in particular, using formulations and doses from, for example, U.S. Pat. No. 8,454,972 (formulations, doses for adenovirus), U.S. Pat. No. 8,404,658 (formulations, doses for AAV) and U.S. Pat. No. 5,846,946 (formulations, doses for I)NA plasmids) and from clinical trials and publications regarding the clinical trials involving lentivirus, AAV and adenovirus. :For examples, for AAV, the route of administration, formulation and dose can be as in U.S. Pat. No. 8,454,972 and as in clinical trials involving AAV. For Adenovirus, the route of administration, formulation and dose can be as in U.S. Pat. No, 8,404,658 and as in clinical trials involving adenovirus. For plasmid delivery, the route of administration, formulation and dose can be as in U.S. Pat. No 5,846,946 and as in clinical studies involving plasmids. Doses may be based on or extrapolated to an average 70 kg individual (e.g., a male adult human), and can be adjusted for patients, subjects, mammals of different weight and species. Frequency of administration is within the ambit of the medical or veterinary practitioner (e.g., physician, veterinarian), depending on usual factors including the age, sex, general health, other conditions of the patient or subject and the particular condition or symptoms being addressed. The viral vectors can be injected into the tissue of interest. For cell-type specific genome/transcriptome modification, the expression of nucleic acid-targeting effector protein (such as a Type V protein such as C2c2) can be driven by a cell-type specific promoter. For example, liver-specific expression might use the Albumin promoter and neuron-specific expression (e.g., for targeting CNS disorders) might use the Synapsin I promoter.

[0568] In terms of in vivo delivery, AAV is advantageous over other viral vectors for a couple of reasons:
[0569] Low toxicity (this may be due to the purification method not requiring ultra centrifugation of cell particles that can activate the immune response) and
[0570] Low probability of causing insertional mutagenesis because it doesn't integrate into the host genome.

[0571] AAV has a packaging limit of 4.5 or 4.75 Kb. This means that nucleic acid-targeting effector protein (such as a Type V protein such as C2c2) as well as a promoter and transcription terminator have to be all tit into the same viral vector. Therefore embodiments of the invention include utilizing homologs of nucleic acid-targeting effector protein (such as a Type V protein such as C2c2) that are shorter.

[0572] As to AAV, the AAV can be AA.VI, AAV2, ;AVS or any combination thereof. One can select the AAV of the AAV with regard to the cells to be targeted; e.g., one can select AAV serotypes 1, 2, 5 or a hybrid capsid AA1, AAV2, AAV5 or any combination thereof for targeting brain or neuronal cells; and one can select AAV4 for targeting cardiac tissue. AAV8 is useful for delivery to the liver. The herein promoters and vectors are preferred individually. A tabulation of certain AAV serotypes as to these cells (see Grimm, D. et al, J. Viral. 5887-5911 (2008)) is as follows:

| Cell Line | AAV-1 | AAV-2 | AAV-3 | AAV-4 | AAV-5 | AAV-6 | AAV-8 | AAV-9 |
|---|---|---|---|---|---|---|---|---|
| Huh-7 | 13 | 100 | 2.5 | 0.0 | 0.1 | 10 | 0.7 | 0.0 |
| HEK293 | 25 | 100 | 2.5 | 0.1 | 0.1 | 5 | 0.7 | 0.1 |
| HeLa | 3 | 100 | 2.0 | 0.1 | 6.7 | 1 | 0.2 | 0.1 |
| HepG2 | 3 | 100 | 16.7 | 0.3 | 1.7 | 5 | 0.3 | ND |
| Hep1A | 20 | 100 | 0.2 | 1.0 | 0.1 | 1 | 0.2 | 0.0 |
| 911 | 17 | 100 | 11 | 0.2 | 0.1 | 17 | 0.1 | ND |
| CHO | 100 | 100 | 14 | 1.4 | 333 | 50 | 10 | 1.0 |
| COS | 33 | 100 | 33 | 3.3 | 5.0 | 14 | 2.0 | 0.5 |
| MeWo | 10 | 100 | 20 | 0.3 | 6.7 | 10 | 1.0 | 0.2 |
| NIH3T3 | 10 | 100 | 2.9 | 2.9 | 0.3 | 10 | 0.3 | ND |
| A549 | 14 | 100 | 20 | ND | 0.5 | 10 | 0.5 | 0.1 |
| HT1180 | 20 | 100 | 10 | 0.1 | 0.3 | 33 | 0.5 | 0.1 |
| Monocytes | 1111 | 100 | ND | ND | 125 | 1429 | ND | ND |
| Immature DC | 2500 | 100 | ND | ND | 222 | 2857 | ND | ND |
| Mature DC | 2222 | 100 | ND | ND | 333 | 3333 | ND | ND |

### Lentivirus

[0573] Lentiviruses are complex retroviruses that have the ability to infect and express their genes in both mitotic and post-mitotic cells. The most commonly known lentivirus is the human immunodeficiency virus (HIV), which uses the envelope glycoproteins of other viruses to target a broad range of cell types.

[0574] Lentiviruses may be prepared as follows. After cloning pCasES10 (which contains a lentiviral transfer plasmid backbone), HEK293FT at low passage (p=5) were seeded in a T-75 flask to 50% confluence the day before transfection in DMEM with 10% fetal bovine serum and without antibiotics. After 20 hours, media was changed to OptiMEM (serum-free) media and transfection was done 4 hours later. Cells were transfected with 10 μg of lentiviral transfer plasmid (pCasES10) and the following packaging plasmids: 5 μg of pMD2.G (VSV-g pseudotype), and 7.5 ug of psPAX2 (gag/pol/rev/tat). Transfection was done in 4 mL OptiMEM with a cationic lipid delivery agent (50 uL Lipofectamine 2000 and 100 ul Plus reagent). After 6 hours, the media was changed to antibiotic-free DMEM with 10% fetal bovine serum. These methods use serum during cell culture, but serum-free methods are preferred.

[0575] Lentivirus may be purified as follows. Viral supernatants were harvested after 48 hours. Supernatants were first cleared of debris and filtered through a 0.45 um low protein binding (PVDF) filter. They were then spun in a ultracentrifuge for 2 hours at 24,000 rpm. Viral pellets were resuspended in 50 ul of DMEM overnight at 4 C. They were then aliquotted and immediately frozen at −80° C.

[0576] In another embodiment, minimal non-primate lentiviral vectors based on the equine infectious anemia virus (EIAV) are also contemplated, especially for ocular gene therapy (see, e.g., Balagaan, J Gene Med 2006; 8: 275-285). In another embodiment, RetinoStat®, an equine inffctious anemia virus-based lentiviral gene therapy vector that expresses angiostatic proteins endostatin and angiostatin that is delivered via a subretinal injection for the treatment of the web form of age-related macular degeneration is also contemplated (see, e.g., Binley et al., HUMAN GENE THERAPY 23:980-991 (September 2012)) and this vector may be modified for the nucleic acid-targeting system of the present invention.

[0577] In another embodiment, self-inactivating lentiviral vectors with an siRNA targeting a common exon shared by HIV tat/rev, a nucleolar-localizing TAR decoy, and an anti-CCR5-specific hammerhead ribozyme (see, e.g., DiGiusto et al. (2010) Sci Transl Med 2:36ra43) may be used/and or adapted to the nucleic acid-targeting system of the present invention. A minimum of 2.5×10⁶ CD34+ cells per kilogram patient weight may be collected and prestimulated for 16 to 20 hours in X-VIVO 15 medium (Lonza) containing 2 μmol/L-glutamine, stem cell factor (100 ng/ml), Flt-3 ligand (Flt-3L) (100 ng/ml), and thrombopoietin (10 ng/ml) (CellGenix) at a density of 2×10⁶ cells/ml. Prestimulated cells may be transduced with lentiviral at a multiplicity of infection of 5 for 16 to 24 hours in 75-cm² tissue culture flasks coated with fibronectin (25 mg/cm²) (RetroNectin,Takara Bio Inc.).

[0578] Lentiviral vectors have been disclosed as in the treatment for Parkinson's Disease, see, e.g., US Patent Publication No, 20120295960 and U.S. Pat. Nos, 7,303,910 and 7,351,585. Lentiviral vectors have also been disclosed for the treatment of ocular diseases, see e.g., US Patent Publication Nos. 20060281180, 20090007284, US20110117189; US20090017543; US20070054961, US20100317109. Lentiviral vectors have also been disclosed for delivery to the brain, see, e.g., US Patent Publication Nos, US20110293571; US20110293571, US20040013648, US20070025970, US20090111106 and U.S. Pat. No. 7,259,015.

### RNA Delivery

[0579] RNA delivery: The nucleic acid-targeting Cas protein, for instance a Type V protein such as C2c2, and/or guide RNA, can also be delivered in the form of RNA. nucleic acid-targeting Cas protein (such as a Type VI protein such as C2c2) mRNA can be generated using in vitro transcription. For example, nucleic acid-targeting effector protein (such as a Type V protein such as C2c2) snRNA can be synthesized using a PCR cassette containing the following elements: T7_promoter-kozak sequence (GCCACC)-effector protrein-3′ UTR from beta globin-polyA tail (a string of 120 or more adenines). The cassette can be used for transcription by T7 polymerase. Guide RNAs can also be transcribed using in vitro transcription from a cassette containing T7_promoter-GG-guide RNA sequence.

[0580] To enhance expression and reduce possible toxicity, the nucleic acid-targeting effector protein-coding sequence and/or the guide RNA can be modified to include one or more modified nucleoside e.g., using pseudo-U or 5-Methyl-C.

[0581] mRNA delivery methods are especially promising for liver delivery currently.

[0582] Much clinical work on RNA delivery has focused on RNAi or antisense, but these systems can be adapted for delivery of RNA for implementing the present invention. References below to RNAi etc. should be read accordingly.

Particle Delivery Systems and/or Formulations:

[0583] Several types of particle delivery systems and/or formulations are known to be useful in a diverse spectrum of biomedical applications. In general, a particle is defined as a small object that behaves as a whole unit with respect to its transport and properties. Particles are further classified according to diameter. Coarse particles cover a range between 2,500 and 10,000 nanometers. Fine particles are sized between 100 and 2,500 nanometers. Ultrafine particles, or nanoparticles, are generally between 1 and 100 nanometers in size. The basis of the 100-nm limit is the fact that novel properties that differentiate particles from the bulk material typically develop at a critical length scale of under 100 nm.

[0584] As used herein, a particle delivery system/formulation is defined as any biological delivery system/formulation which includes a particle in accordance with the present invention. A particle in accordance with the present invention is any entity having a greatest dimension (e.g diameter) of less than 100 microns (μm). In some embodiments, inventive particles have a greatest dimension of less than 10 μm. In some embodiments, inventive particles have a greatest dimension of less than 2000 nanometers(nm). In some embodiments, inventive particles have a greatest dimension of less than 1000 nanometers (nm). In some embodiments, inventive particles have a greatest dimension of less than 900 nm, 800 nm, 700 nm, 600 nm, 500 nm, 400 nm, 300 nm, 200 nm, or 100 run. Typically, inventive particles have a greatest dimension (e.g., diameter) of 500 nm or less. In some embodiments, inventive particles have a greatest dimension (e.g., diameter) of 250 nm or less. In some embodiments, inventive particles have a greatest dimension (e.g., diameter) of 200 nm or less. In some embodiments, inventive particles have a greatest dimension (e.g., diameter) of 150 nm or less. in some embodiments, inventive particles have a greatest dimension (e.g., diameter) of 100 nm or less. Smaller particles, e.g., having a greatest dimension of 50 nm or less are used in some embodiments of the invention. In some embodiments, inventive particles have a greatest dimension ranging between 25 nm and 200 nm.

[0585] Particle characterization (including e.g., characterizing morphology, dimension, etc.) is done using a variety of different techniques. Common techniques are electron microscopy (TEM, SEM), atomic force microscopy (AFM), dynamic light scattering (DLS), X-ray photoelectron spectroscopy (XPS), powder X-ray diffraction (XRD), Fourier transform infrared. spectroscopy (FTIR), matrix-assisted laser desorption/ionization time-of-flight mass spectrometry(MALDI-TDF), ultraviolet-visible spectroscopy, dual polarisation interferometry and nuclear magnetic resonance (NMR). Characterization (dimension measurements) may be made as to native particles (i.e., preloading) or after loading of the cargo (herein cargo refers to e.g., one or more components of CRISPR-Cas system e.g., CRISPR enzyme or mRNA or guide RNA, or any combination thereof, and may include additional carriers and/or excipients) to provide particles of an optimal size for delivery for any in vitro, ex vivo and/or in vivo application of the present invention. In certain preferred embodiments, particle dimension (e.g., diameter) characterization is based on measurements using dynamic laser scattering (DLS). Mention is made of U.S. Pat. No. 8,709,843; U.S. Pat. No. 6,007,845; U.S. Pat. No. 5,855,913; U.S. Pat. No. 5,985,309; U.S. Pat. No. 5,543,158; and the publication by James E. Dahlman and Carmen Barnes et al. Nature Nanotechnology (2014) published online 11 May 2014, doi:11.0.1038/nnano.2014.84, concerning particles, methods of making and using them and measurements thereof.

[0586] Particles delivery systems within the scope of the present invention may be provided in any form, including but not limited to solid, semi-solid, emulsion, or colloidal particles. As such any of the delivery systems described herein, including but not limited to, e.g., lipid-based systems, liposomes, micelles, microvesicles, exosomes, or gene gun may be provided as particle delivery systems within the scope of the present invention.

### Particles

[0587] CRISPR enzyme mRNA and guide RNA may be delivered simultaneously using particles or lipid envelopes; for instance, CRISPR enzyme and RNA of the invention, e.g., as a complex, can be delivered via a particle as in Dahlman et al., WO2015089419 A2 and documents cited therein, such as 7C1 (see, e.g., James E. Dahlman and Carmen Barnes et al. Nature Nanotechnology (2014) published online 11 May 2014, doi:10.1038/nnano.2014.84), e.g., delivery particle comprising lipid or lipidoid and hydrophilic polymer, e.g., cationic lipid and hydrophilic polymer, for instance wherein the the cationic lipid comprises 1,2-dioleoyl-3-trimethylammonium-propane (DOTAP) or 1,2-ditetradecanoyl-sn-glycero-3-phosphocholine (DMPC) and/or wherein the hydrophilic polymer comprises ethylene glycol or polyethylene glycol (PEG); and/or wherein the particle further comprises cholesterol (e.g., particle from formulation 1=DOTAP 100, DMPC 0, PEG 0, Cholesterol 0; formulation number 2=DOTAP 90, DMPC 0, PEG 10, Cholesterol 0; formulation number 3=DOTAP 90. DMPC 0, PEG 5, Cholesterol 5), wherein particles are formed using an efficient, multistep process wherein first, effector protein and RNA are mixed together, e.g., at a 1:1 molar ratio, e.g., at room temperature, e.g., for 30 minutes, e.g., in sterile, nuclease free 1×PBS; and separately, DOTAP, DMPC, PEG, and cholesterol as applicable for the formulation are dissolved in alcohol, e.g., 100% ethanol; and, the two solutions are mixed together to form particles containing the complexes).

[0588] Nucleic acid-targeting effector proteins (such as a Type VI protein such as C2c2) mRNA and guide RNA may be delivered simultaneously using particles or lipid envelopes.

[0589] For example, Su X, Fricke J, Kavanagh D G, Irvine D J (“In vitro and in vivo mRNA delivery using lipid-enveloped pH-responsive polymer na.noparticles” Mol Pharm. 2011 Jun. 6; 8(3):774-87. doi: 110.10 1/m000390w. Epub 2011 Apr. 1) describes biodegradable core-shell structured particles with a poly(β-amino ester) (PBAE) core enveloped by a phospholipid bilayer shell. These were developed for in vivo mRNA delivery. The pH-responsive PBAE component was chosen to promote endosome disruption, while the lipid surface layer was selected to minimize toxicity of the polycation core. Such are, therefore, preferred for delivering RNA of the present invention.

[0590] In one embodiment, particles based on self-assembling bioadhesive polymers are contemplated, which may be applied to oral delivery of peptides, intravenous delivery of peptides and nasal delivery of peptides, all to the brain. Other embodiments, such as oral absorption and ocular delivery of hydrophobic drugs are also contemplated. The molecular envelope technology involves an engineered polymer envelope which is protected and delivered to the site of the disease (see, e.g., Mazza, M. et al. ACSNano, 2013. 7(2): 1016-1026; Siew, A., et al. Mol Pharm, 2012. 9(1):14-28; Lalatsa, A., et al. J Contr Rel, 2012. 161(2):523-36; Lalatsa, A., et al., Mol Pharm, 2012. 9(6):1665-80; Lalatsa, A., et al. Mol Pharm, 2012. 9(6):1764-74; Garrett, N. L., et al. J Biophotonics, 2012. 5(5-6):458-68; Garrett, N. L., et al. J Raman Spect, 2012. 43(5):681-688; Ahmad, S., et al. J Royal Soc Interface 2010. 7:S423-33; Uchegbu, I. F. Expert Opin Drug Deliv, 2006. 3(5):629-40; Qu, X.,et al. Biomacromolecules, 2006. 7(12):3452-9 and Uchegbu, I F., et al. Int J Pharm, 2001. 224:185-199). Doses of about 5 mg/kg are contemplated, with single or multiple doses, depending on the target tissue.

[0591] In one embodiment, particles that can deliver RN⁻A to a cancer cell to stop tumor growth developed by Dan Anderson's lab at MIT may be used/and or adapted to the nucleic acid-targeting system of the present invention. In particular, the Anderson lab developed fully automated, combinatorial systems for the synthesis, purification, characterization, and formulation of new biomaterials and nanoformulations. See, e.g., Alabi et al., Proc Natl Acad Sci USA. 2013 Aug. 6; 110(32):12881-6; Zhang et al., Adv Mater. 2013 Sep. 6; 25(33):4641-5; Jiang et al., Nano Lett. 2013 Mar. 13; 13(3):1059-64; Karagiannis et al., ACS Nano. 2012 Oct. 23; 6(10):8484-7; Whitehead et al., ACS Nano. 2012 Aug. 28; 6(8):6922-9 and Lee et al., Nat Nanotechnol. 2012 Jun. 3; 7(6):389-93.

[0592] US patent application 20110293703 relates to lipidoid compounds are also particularly useful in the administration of polynucleotides, which may be applied to deliver the nucleic acid-targeting system of the present invention. In one aspect, the aminoalcohol ipidoid compounds are combined with an agent to be delivered to a cell or a subject to form microparticies, nanoparticies, liposomes, or micelles. The agent to be delivered by the particles, liposomes, or micelles may be in the form of a gas, liquid, or solid, and the agent may be a polynucleotide, protein, peptide, or small molecule. The minoalcohol lipidoid compounds may be combined with other aminoalcohol lipidoid compounds, polymers (synthetic or natural), surfactants, cholesterol, carbohydrates, proteins, lipids, etc. to form the particles. These particles may then optionally be combined with a pharmaceutical excipient to form a pharmaceutical composition.

[0593] US Patent Publication No. 20110293703 also provides methods of preparing the aminoalcohol lipidoid compounds. One or more equivalents of an amine are allowed to react with one or more equivalents of an epoxide-terminated compound under suitable conditions to form an aminoalcohol lipidoid compound of the present invention. In certain embodiments, all the amino groups of the amine are fully reacted with the epoxide-terminated compound to form tertiary amines. In other embodiments, all the amino groups of the amine are not fully reacted with the epoxide-terminated compound to form tertiary amines thereby resulting in primary or secondary amines in the aminoalcohol lipidoid compound. These primary or secondary amines are left as is or may be reacted with another electrophile such as a different epoxide-terminated compound. As will be appreciated by one skilled in the art, reacting an amine with less than excess of epoxide-terminated compound will result in a plurality of different aminoalcohol lipidoid compounds with various numbers of tails. Certain amines may be fully functionalized with two epoxide-derived compound tails while other molecules will not be completely functionalized with epoxide-derived compound tails. For example, a diamine or polyamine may include one, two, three, or four epoxide-derived compound tails off the various amino moieties of the molecule resulting in primary, secondary, and tertiary amines. In certain embodiments, all the amino groups are not fully functionalized. In certain embodiments, two of the same types of epoxide-terminated compounds are used. In other embodiments, two or more different epoxide-terminated compounds are used. The synthesis of the aminoalcohol lipidoid compounds is performed with or without solvent, and the synthesis may be performed at higher temperatures ranging from 30-100° C., preferably at approximately 50-90° C. The prepared aminoalcohol lipidoid compounds may be optionally purified. For example, the mixture of aminoalcohol lipidoid compounds may be purified to yield an a.minoalcohol lipidoid compound with a particular number of epoxide-derived compound tails. Or the mixture may be purified to yield a particular stereo- or regioisomer. The aminoalcohol lipidoid compounds may also be alkylated using an alkyl halide (e.g., methyl iodide) or other alkylating agent, and/or they may be acylated.

[0594] US Patent Publication No. 20110293703 also provides libraries of aminoalcohol lipidoid compounds prepared by the inventive methods. These aminoalcohol lipidoid compounds may be prepared and/or screened using high-throughput techniques involving liquid handlers, robots, microtiter plates, computers, etc. In certain embodiments, the aminoalcohol lipidoid compounds are screened for their ability to transfect polynucleotides or other agents (e.g., proteins, peptides, small molecules) into the cell.

[0595] US Patent Publication No. 20130302401 relates to a class of poly(beta-amino alcohols) (PBAAs) has been prepared using combinatorial polymerization. The inventive PBAAs may be used in biotechnology and biomedical applications as coatings (such as coatings of films or multilayer films for medical devices or implants), additives, materials, excipients, non-biofouling agents, micropatterning agents, and cellular encapsulation agents. When used as surface coatings, these PBAAs elicited different levels of inflammation, both in vitro and in vivo, depending on their chemical structures. The large chemical diversity of this class of materials allowed us to identify polymer coatings that inhibit macrophage activation in vitro. Furthermore, these coatings reduce the recruitment of inflammatory cells, and reduce fibrosis, following the subcutaneous implantation of carboxylated polystyrene microparticles. These polymers may be used to form polyelectrolyte complex capsules for cell encapsulation. The invention may also have many other biological applications such as antimicrobial coatings, DNA or siRNA delivery, and stem cell tissue engineering. The teachings of US Patent Publication No. 20130302401 may be applied to the nucleic acid-targeting system of the present invention.

[0596] In another embodiment, lipid nanoparticles (LNPs) are contemplated. An antitransthyretin small interfering RNA has been encapsulated in lipid nanoparticles and delivered to humans (see, e.g., Coelho et al., N Engl. J Med 2013;369:819-29), and such a system may be adapted and applied to the nucleic acid-targeting system of the present invention. Doses of about 0.01 to about 1 mg per kg of body weight administered intravenously are contemplated. Medications to reduce the risk of infusion-related reactions are contemplated, such as dexamethasone, acetampinophen, diphenhydramine or cetirizine, and ranitidine are contemplated, Multiple doses of about 0.3 mg per kilogram every 4 weeks for five doses are also contemplated.

[0597] LNPs have been shown to be highly effective in delivering siRNAs to the liver (see, e.g., Tabernero et al., Cancer Discovery, April 2013, Vol. 3, No. 4, pages 363-470) and are therefore contemplated for delivering RNA encoding nucleic acid-targeting effector protein to the liver. A dosage of about four doses of 6 mg/kg of the LNP every two weeks may he contemplated. Tabernero et al. demonstrated that tumor regression was observed after the first 2 cycles of LNPs dosed at 0.7 mg/kg, and by the end of 6 cycles the patient had achieved a partial response with complete regression of the lymph node metastasis and substantial shrinkage of the liver tumors. A complete response was obtained after 40 doses in this patient, who has remained in remission and completed treatment after receiving doses over 26 months. Two patients with RCC and extrahepatic sites of disease including kidney, lung, and lymph nodes that were progressing following prior therapy with VEGF pathway inhibitors had stable disease at all sites for approximately 8 to 12 months, and a patient with PNET and liver metastases continued on the extension study for 18 months (36 doses) with stable disease.

[0598] However, the charge of the LNP must be taken into consideration. As cationic lipids combined with negatively charged lipids to induce nonbilayer structures that facilitate intracellular delivery. Because charged LNPs are rapidly cleared from circulation following intravenous injection, ionizable cationic lipids with pKa values below 7 were developed (see, e.g., Rosin et al, Molecular Therapy, vol. 19, no. 12, pages 1286-2200, Dec. 2011). Negatively charged polymers such as RNA may be loaded into LNPs at low pH values (e.g., pH 4) where the ionizable lipids display a positive charge. However, at physiological pH values, the LNPs exhibit a low surface charge compatible with longer circulation times. Four species of ionizable cationic lipids have been focused upon, namely 1,2-dilineoyl-3-dimethylammonium-propane (DLinDAP), 1,2-dilinoleyloxy-3-N,N-dimethylaminopropane (DLinDMA), 1,2-dilinoleyloxy-keto-N,N-dimethyl-3-aminopropane (DLinKDMA), and 1,2-dilinoleyl-4-(2-dimethylaminoethyl)-[1,3]-dioxolane (DLinKC2-DMA). It has been shown that LNP siRNA systems containing these lipids exhibit remarkably different gene silencing properties in hepatocytes in vivo, with potencies varying according to the series DLinKC2-DMA>DLinKDMA>DLinDMA>>DLinDAP employing a Factor VII gene silencing model (see, e.g., Rosin et al, Molecular Therapy, vol. 19, no. 12, pages 1286-2200, December 2011). A dosage of 1 μg/ml of LNP or CRISPR-Cas RNA in or associated with the LNP may be contemplated, especially for a formulation containing DLinKC2-DMA.

[0599] Preparation of LNPs and CRISPR-Cas encapsulation may be used/and or adapted from Rosin et al, Molecular Therapy, vol. 19, no. 12, pages 1286-2200, December 2011). The cationic lipids 1,2-dilineoyl-3-dimethylammonium-propane (DLinDAP), 1,2-dilinoleyloxy-3-N,N-dimethylaminopropane (DLinDMA), 1,2-dilinoleyloxyketo-N,N-dimethyl-3-aminopropane (DLinK-DMA), 1,2-dilinoleyl-4-(2-dimethylaminoethyl)[1,3]-dioxolane (DLinKC2-DMA), (3-o-[2″-(methoxypolyethyleneglycol 2000) succinoyl]-1,2-dimyristoyl-sn-glycol (PEG-S-DMG), and R-3-[(ω-methoxy-poly(ethylene glycol)2000) carbamoyl]-1,2-dimyristyloxlpropyl-3-amine (PEG-C-DOME) may be provided by Tekmira Pharmaceuticals (Vancouver, Canada) or synthesized. Cholesterol may be purchased from Sigma (St Louis, Mo.). The specific nucleic acid-targeting complex (CRISPR-Cas) RNA may be encapsulated in LNPs containing DLinDAP, DLinDMA, DLinK-DMA, and DLinKC2-DMA (cationic lipid:DSPC:CHOL: PEGS-DMG or PEG-C-DOMG at 40:10:40:10 molar ratios). When required, 0.2% SP-DiOC18 (Invitrogen, Burlington, Canada) may be incorporated to assess cellular uptake, intracellular delivery, and biodistribution. Encapsulation may be performed by dissolving lipid mixtures comprised of cationic lipid:DSPC:cholesterol:PEG-c-DOME (40:10:40:10 molar ratio) in ethanol to a final lipid concentration of 10 mmol/l. This ethanol solution of lipid may be added drop-wise to 50 mmol/l citrate, pH 4.0 to form multilamellar vesicles to produce a final concentration of 30% ethanol vol/vol. Large unilamellar vesicles may be formed following extrusion of multilamellar vesicles through two stacked 80 nm Nuclepore polycarbonate filters using the Extruder (Northern Lipids, Vancouver, Canada). Encapsulation may be achieved by adding RNA dissolved at 2 mg/ml in 50 mmol/l citrate, pH 4.0 containing 30% ethanol vol/vol drop-wise to extruded preformed large unilamellar vesicles and incubation at 31° C. for 30 minutes with constant mixing to a final RNA/lipid weight ratio of 0.06/1 wt/wt. Removal of ethanol and neutralization of formulation buffer were performed by dialysis against phosphate-buffered saline (PBS), pH 7.4 for 16 hours using Spectra/Por 2 regenerated cellulose dialysis membranes. Particle size distribution may be determined by dynamic light scattering using a NICOMP 370 particle sizer, the vesicle/intensity modes, and Gaussian fitting (Nicomp Particle Sizing, Santa Barbara, Calif.). The particle size for all three LNP systems may be ˜70 nm in diameter. RNA encapsulation efficiency may be determined by removal of free RNA using VivaPureD MiniH columns (Sartorius Stedim Biotech) from samples collected before and after dialysis. The encapsulated RNA may be extracted from the eluted particles and quantified at 260 nm. RNA to lipid ratio was determined by measurement of cholesterol content in vesicles using the Cholesterol E enzymatic assay from Wako Chemicals USA (Richmond, Va.). In conjunction with the herein discussion of LNPs and PEG lipids, PEGylated liposomes or LNPs are likewise suitable for delivery of a nucleic acid-targeting system or components thereof.

[0600] Preparation of large LNPs may be used/and or adapted from Rosin et al, Molecular Therapy, vol. 19, no. 12, pages 1286-2200, December 2011. A lipid premix solution (20.4 mg/ml total lipid concentration) may be prepared in ethanol containing DLinKC2-DMA, DSPC, and cholesterol at 50:10:38.5 molar ratios. Sodium acetate may be added to the lipid premix at a molar ratio of 0.75:1 (sodium acetateDLinKC2-DMA). The lipids may be subsequently hydrated by combining the mixture with 1.85 volumes of citrate buffer (10 mmol/l, pH 3.0) with vigorous stirring, resulting in spontaneous liposome formation in aqueous buffer containing 35% ethanol. The liposome solution may be incubated at 37° C. to allow for time-dependent increase in particle size. Aliquots may be removed at various times during incubation to investigate changes in liposome size by dynamic light scattering (Zetasizer Nano ZS, Malvern Instruments, Worcestershire, UK). Once the desired particle size is achieved, an aqueous PEG lipid solution (stock =10 mg/m1 PEG-DAM in 35% (vol/vol) ethanol) may be added to the liposome mixture to yield a final PEG molar concentration of 3.5% of total lipid. Upon addition of PEG-lipids, the liposomes should their size, effectively quenching further growth. RNA may then be added to the empty liposomes at a RNA to total lipid ratio of approximately 1:10 (wt:wt), followed by incubation for 30 minutes at 37° C. to form loaded LNPs. The mixture may be subsequently dialyzed overnight in PBS and filtered with a 0.45-μm syringe filter.

[0601] Spherical Nucleic Acid (SNA™) constructs and other particles (particularly gold particles) are also contemplated as a means to delivery nucleic acid-targeting system to intended targets, Significant data show that AuraSense Therapeutics' Spherical Nucleic Acid (SNA™) constructs, based upon nucleic acid-functionalized gold particles, are useful.

[0602] Literature that may be employed in conjunction with herein teachings include: Cutler et al., J. Am, Chem. Soc. 2011 133:9254-9257, Hao et al., Small. 2011 7:3158-3162, Zhang et al., ACS Nano. 2011 5:6962-6970, Cutler et al., J. Am. Chem. Soc. 2012 134:1376-1391, Young et al., Nano Lett. 2012 12:3867-71, Zheng et Proc. Natl. Acad. Sci. USA. 2012 109:11975-80, Mirkin, Nanomedicine 2012 7:635-638 Zhang et al., J. Am. Chem. Soc. 2012 134:16488-1691, Weintraub, Nature 2013 495:S14-S16, Choi et al., Proc. Natl. Acad. Sci. USA. 2013 110(19):7625-7630, Jensen et al., Sci. Transl. Med. 5, 209ra152 (2013) and Mirkin, et al., Small, 10:186-192.

[0603] Self-assembling particles with RNA may be constructed with polyethyleneimine (PEI) that is PEGylated with an Arg-Gly-Asp (RGD) peptide ligand attached at the distal end of the polyethylene glycol (PEG). This system has been used, for example, as a means to target tumor neovasculature expressing integrins and deliver siRNA inhibiting vascular endothelial growth factor receptor-2 (VEGF R2) expression and thereby achieve tumor angiogenesis (see, e.g., Schiffelers et al., Nucleic Acids Research, 2004, Vol. 32, No. 19). Nanoplexes may be prepared by mixing equal volumes of aqueous solutions of cationic polymer and nucleic acid to give a net molar excess of ionizable nitrogen (polymer) to phosphate (nucleic acid) over the range of 2 to 6. The electrostatic interactions between cationic polymers and nucleic acid resulted in the formation of polyplexes with average particle size distribution of about 100 nm, hence referred to here as nanoplexes. A dosage of about 100 to 200 mg of nucleic acid-targeting complex RNA is envisioned for delivery in the self-assembling particles of Schiffelers et al.

[0604] The nanoplexes of Bartlett et al. (PNAS, Sep. 25, 2007,vol. 104, no. 39) may also be applied to the present invention. The nanoplexes of Bartlett et al. are prepared by mixing equal ⁻volumes of aqueous solutions of cationic polymer and nucleic acid to give a net molar excess of ionizable nitrogen (polymer) to phosphate (nucleic acid) over the range of 2 to 6. The electrostatic interactions between cationic polymers and nucleic acid resulted in the formation of polyplexes with average particle size distribution of about 100 nm, hence referred to here as nanoplexes. The DOTA-siRNA of Bartlett et al. was synthesized as follows: 1,4,7,10-tetraazacyclododecane-1,4,7,10-tetraacetic acid mono(N-hydroxysuccinimide ester) (DOTA-NHSester) was ordered from Macrocyclics (Dallas, Tex.). The amine modified RNA sense strand with a 100-fold molar excess of DOTA-NHS-ester in carbonate buffer (pH 9) was added to a microcentrifuge tube. The contents were reacted by stirring for 4 h at room temperature. The IOTA-RNAsense conjugate was ethanol-precipitated, resuspended in water, and annealed to the unmodified antisense strand to yield DOTA-siRNA. All liquids were pretreated with Chelex-100 (Bio-Rad, Hercules, Calif.) to remove trace metal contaminants. Tf-targeted and non targeted siRNA particles may be formed by using cyclodextrin-containing polycations. Typically, particles were formed in water at a charge ratio of 3 (+/−) and an siRNA concentration of 0.5 g/liter. One percent of the adamantane-PEG molecules on the surface of the targeted particles were modified with Tf (adamantane-PEG-Tf). The particles were suspended in a 5% (wt/vol) glucose carrier solution for injection.

[0605] Davis et al. (Nature, Vol 464, 15 Apr. 2010) conducts a RNA clinical trial that uses a targeted particle-delivery system (clinical trial registration number NCT00689065). Patients with solid cancers refractory to standard-of-care therapies are administered doses of targeted particles on days 1, 3, 8 and 10 of a 21-day cycle by a 30-min intravenous infusion. The particles comprise, consist essentially of, or consist of a synthetic delivery system containing: (1) a linear, cyclodextrin-based polymer (CDP), (2) a human transferrin protein (TF) targeting ligand displayed on the exterior of the nanoparticle to engage IF receptors (TFR) on the surface of the cancer cells, (3) a hydrophilic polymer (polyethylene glycol (PEG) used to promote nanoparticle stability in biological fluids), and (4) siRNA designed to reduce the expression of the RRM2 (sequence used in the clinic was previously denoted siR2B+5). The TFR has long been known to be upregulated in malignant cells, and RRM2 is an established anti-cancer target. These particles (clinical version denoted as CALAA-01) have been shown to be well tolerated in multi-dosing studies in non-human primates. Although a single patient with chronic myeloid leukaemia has been administered siRNAby liposomal delivery, Davis et al.'s clinical trial is the initial human trial to systemically deliver siRNA with a targeted delivery system and to treat patients with solid cancer. To ascertain whether the targeted delivery system can provide effective delivery of functional siRNA to human tumours, Davis et al. investigated biopsies from three patients from three different dosing cohorts; patients A, B and C, all of whom had metastatic melanoma and received CALAA-01 doses of 18, 24 and 30 mg m⁻² siRNA, respectively. Similar doses may also be contemplated for the nucleic acid-targeting system of the present invention. The delivery of the invention may be achieved with particles containing a linear, cyclodextrin-based polymer (CDP), a human transferrin protein (TF) targeting ligand displayed on the exterior of the particle to engage TF receptors (TFR) on the surface of the cancer cells and/or a hydrophilic polymer (for example, polyethylene glycol (PEG) used to promote particle stability in biological fluids).

[0606] In terms of this invention, it is preferred to have one or more components of nucleic acid-targeting complex, e.g., nucleic acid-targeting effector protein or mRNA, or guide RNA delivered using particles or lipid envelopes. Other delivery systems or vectors are may be used in conjunction with the particle aspects of the invention.

[0607] In general, a “nanoparticle” refers to any particle having a diameter of less than 1000 um. In certain preferred embodiments, nanoparticles of the invention have a greatest dimension (e.g., diameter) of 500 nm or less. In other preferred embodiments, nanoparticles of the invention have a greatest dimension ranging between 25 nm and 200 nm. In other preferred embodiments, particles of the invention have a greatest dimension of 100 nm or less. In other preferred embodiments, nanoparticles of the invention have a greatest dimension ranging between 35 nm and 60 nm.

[0608] Particles encompassed in the present invention may be provided in different forms, e.g., as solid particles (e.g., metal such as silver, gold, iron, titanium), non-metal, lipid-based solids, polymers), suspensions of particles, or combinations thereof. Metal, dielectric, and semiconductor particles may be prepared, as well as hybrid structures (e.g., core-shell particles). Particles made of semiconducting material may also be labeled quantum dots if they are small enough (typically sub 10 nm) that quantization of electronic energy levels occurs. Such nanoscale particles are used in biomedical applications as drug carriers or imaging agents and may be adapted for similar purposes in the present invention.

[0609] Semi-solid and soft particles have been manufactured, and are within the scope of the present invention. A prototype particle of semi-solid nature is the liposome. Various types of liposome particles are currently used clinically as delivery systems for anticancer drugs and vaccines. Particles with one half hydrophilic and the other half hydrophobic are termed Janus particles and are particularly effective for stabilizing emulsions. They can self-assemble at water/oil interfaces and act as solid surfactants.

[0610] U.S. Pat. No. 8,709,843, incorporated herein by reference, provides a drug delivery system for targeted delivery of therapeutic agent-containing particles to tissues, cells, and intracellular compartments. The invention provides targeted particles comprising polymer conjugated to a surfactant, hydrophilic polymer or lipid.

[0611] U.S. Pat. No. 6,007,845, incorporated herein by reference, provides particles which have a core of a multiblock copolymer formed by covalently linking a multifunctional compound with one or more hydrophobic polymers and one or more hydrophilic polymers, and contain a biologically active material.

[0612] U.S. Pat. No. 5,855,913, incorporated herein by reference, provides a particulate composition having aerodynamically light particles having a tap density of less than 0.4 g/cm3 with a mean diameter of between 5 μm and 30 μm, incorporating a surfactant on the surface thereof for drug delivery to the pulmonary system.

[0613] U.S. Pat. No. 5,985,309, incorporated herein by reference, provides particles incorporating a surfactant and/or a hydrophilic or hydrophobic complex of a positively or negatively charged therapeutic or diagnostic agent and a charged molecule of opposite charge for delivery to the pulmonary system.

[0614] U.S. Pat. No. 5,543,158, incorporated herein by reference, provides biodegradable injectable particles having a biodegradable solid core containing a biologically active material and poly(alkylene glycol) moieties on the surface.

[0615] WO2012135025 (also published as US20120251560), incorporated herein by reference, describes conjugated polyethyleneimine (PEI) polymers and conjugated aza-macrocycles (collectively referred to as “conjugated lipomer” or “lipomers”). In certain embodiments, it can be envisioned that such methods and materials of herein-cited documents, e.g., conjugated lipomers can be used in the context of the nucleic acid-targeting system to achieve in vitro, ex vivo and in vivo genomic perturbations to modify gene expression, including modulation of protein expression.

[0616] In one embodiment, the particle may be epoxide-modified lipid-polymer, advantageously 7C1 (see, e.g., James E. :Dahlman and Carmen Barnes et al. Nature Nanotechnology (2014) published online 11 May 2014, doi:10.1038/nnano.2014.84). C71 was synthesized by reacting C15 epoxide-terminated lipids with PEI600 at a 14:1 molar ratio, and was formulated with C14PEG2000 to produce particles (diameter between 35 and 60 nm) that were stable in PBS solution for at least 40 days.

[0617] An epoxide-modified lipid-polymer may be utilized to deliver the nucleic acid-targeting system of the present invention to pulmonary, cardiovascular or renal cells, however, one of skill in the art may adapt the system to deliver to other target organs. Dosage ranging from about 0.05 to about 0.6 mg/kg are envisioned. Dosages over several days or weeks are also envisioned, with a total dosage of about 2 mg/kg.

### Exosomes

[0618] Exosomes are endogenous nano-vesicles that transport RNAs and proteins, and which can deliver RNA to the brain and other target organs. To reduce immunogenicity, Alvarez-Erviti et al, (2011, Nat Biotechnol 29: 341) used self-derived dendritic cells for exosome production. Targeting to the brain was achieved by engineering the dendritic cells to express Lamp2b, an exosomal membrane protein, fused to the neuron-specific RVG peptide. Purified exosomes were loaded with exogenous RNA by electroporation. Intravenously injected RVG-targeted exosomes delivered. GAPDH siRNA specifically to neurons, microglia, oligodendrocytes in the brain, resulting in a specific gene knockdown. Pre-exposure to RVG exosomes did not attenuate knockdown, and non-specific uptake in other tissues was not observed. The therapeutic potential of exosome-mediated siRNA delivery was demonstrated by the strong mRNA (60%) and protein (62%) knockdown of BACE1, a therapeutic target in Alzheimer's disease.

[0619] To obtain a pool of immunologically inert exosomes, Alvarez-Erviti et al, harvested bone marrow from inbred C57BL/6 mice with a homogenous major histocompatibility complex (MHC) haplotype. As immature dendritic cells produce large quantities of exosomes devoid of T-cell activators such as MHC-II and CD86, Alvarez-Erviti et al. selected for dendritic cells with granulocyte/macrophage-colony stimulating factor (GM-CSF) for 7 d. Exosomes were purified from the culture supernatant the following day using well-established ultracentrifugation protocols. The exosomes produced were physically homogenous, with a size distribution peaking at 80 nm in diameter as determined by particle tracking analysis (NTA) and electron microscopy. Alvarez-Erviti et al. obtained 6-12 μg of exosomes (measured based on protein concentration) per 10⁶ cells.

[0620] Next, Alvarez-Erviti et al. investigated the possibility of loading modified exosomes with exogenous cargoes using electroporation protocols adapted for nanoscale applications. As electroporation for membrane particles at the nanometer scale is not well-characterized, nonspecific Cy5-labeled RNA was used for the empirical optimization of the electroporation protocol. The amount of encapsulated RNA was assayed after ultracentrifugation and lysis of exosomes. Electroporation at 400 V and 125 μF resulted in the greatest retention of RNA and was used for all subsequent experiments.

[0621] Alvarez-Erviti et al. administered 150 μg of each BACE1 siRNA encapsulated in 150 μg of RVG exosomes to normal C57B116 mice and compared the knockdown efficiency to four controls: untreated mice, mice injected with RVG exosomes only, mice injected with BACE1 siRNA complexed to an in vivo cationic liposome reagent and mice injected with BACE1 siRNA complexed to RVG-9R, the RVG peptide conjugated to 9 D-arginines that electrostatically binds to the siRNA. Cortical tissue samples were analyzed 3 d after administration and a significant protein knockdown (45%, P<0.05, versus 62%, P<0.01) in both siRNA-RVG-9R-treated and siRNARVG exosome-treated mice was observed, resulting from a significant decrease in BACE1 mRNA levels (66% [+ or −] 15%, P<0.001 and 61% [+ or −] 13% respectively, P<0.01). Moreover, Applicants demonstrated a significant decrease (55%, P<0.05) in the total [beta]-amyloid 1-42 levels, a main component of the amyloid plaques in Alzheimer's pathology, in the RVG-exosome-treated animals. The decrease observed was greater than the β-amyloid 1-40 decrease demonstrated in normal mice after intraventricular injection of BACE1 inhibitors. Alvarez-Erviti et al. carried out 5′-rapid amplification of cDNA ends (RACE) on BACE1 cleavage product, which provided evidence of RNAi-mediated knockdown by the siRNA.

[0622] Finally, Alvarez-Erviti et al. investigated whether RNA-RVG exosomes induced immune responses in vivo by assessing IL-6, IP-10, TNFα and IFN-α serum concentrations. .Following exosome treatment, nonsignificant changes in all cytokines were registered similar to siRNA-transfection reagent treatment in contrast to siRNA-RVG-9R, which potently stimulated IL-6 secretion, confirming the immunologically inert profile of the exosome treatment. Given that exosomes encapsulate only 20% of siRNA, delivery with RVG-exosome appears to be more efficient than RVG-9R delivery as comparable mRNA knockdown and greater protein knockdown was achieved with fivefold less siRNA without the corresponding level of immune stimulation. This experiment demonstrated the therapeutic potential of RVG-exosome technology, which is potentially suited for long-term silencing of genes related to neurodegenerative diseases. The exosome delivery system of Alvarez-Erviti et al, may be applied to deliver the nucleic acid-targeting system of the present invention to therapeutic targets, especially neurodegenerative diseases. A dosage of about 100 to 1000 mg of nucleic acid-targeting system encapsulated in about 100 to 1000 mg of RVG exosomes may be contemplated for the present invention.

[0623] El-Andaloussi et al. (Nature Protocols 7,2112--21.26(2012)) discloses how exosomes derived from cultured cells can be harnessed for delivery of RNA in vitro and in vivo. This protocol first describes the generation of targeted exosomes through transfection of an expression vector, comprising an exosomal protein fused with a peptide ligand. Next, El-Andaloussi et al. explain how to purify and characterize exosomes from transfected cell supernatant. Next, El-Andaloussi et al. detail crucial steps for loading RNA into exosomes. Finally, El-Andaloussi et al. outline how to use exosomes to efficiently deliver RNA in vitro and in vivo in mouse brain, Examples of anticipated results in which exosome-mediated RNA delivery is evaluated by functional assays and imaging are also provided. The entire protocol takes ˜3 weeks. Delivery or administration according to the invention may be performed using exosotnes produced from self-derived dendritic cells. From the herein teachings, this can be employed in the practice of the invention

[0624] In another embodiment, the plasma exosomes of Wahlgren et al. (Nucleic Acids Research, 2012, Vol. 40, No. 17 e130) are contemplated. Exosomes are nano-sized vesicles (30-90 nm in size) produced by many cell types, including dendritic cells (DC), B cells, T cells, mast cells, epithelial cells and tumor cells. These vesicles are formed by inward budding of late endosomes and are then released to the extracellular environment upon fusion with the plasma membrane. Because exosomes naturally carry RNA between cells, this property may be useful in gene therapy, and from this disclosure can be employed in the practice of the instant invention,

[0625] Exosomes from plasma can be prepared by centrifugation of buffy coat at 900 g for 20 min to isolate the plasma followed by harvesting cell supernatants, centrifuging at 300 g for 10 min to eliminate cells and at 16 500 g for 30 min followed by filtration through a 0.22 mm filter. Exosomes are pelleted by ultracentrifugation at 120 000 g for 70 min. Chemical transfection of siRNA into exosomes is carried out according to the manufacturer's instructions in RNAi Human/Mouse Starter Kit (Quiagen, Hilden, Germany). siRNA is added to 100 ml PBS at a final concentration of 2 mmol/ml. After adding HiPerFect transfection reagent, the mixture is incubated for 10 min at RT. In order to remove the excess of micelles, the exosomes are re-isolated using aldehyde/sulfate latex beads, The chemical transfection of nucleic acid-targeting system into exosomes may be conducted similarly to siRNA. The exosomes may be co-cultured with monocytes and lymphocytes isolated from the peripheral blood of healthy donors. Therefore, it may be contemplated that exosomes containing nucleic acid-targeting system may be introduced to monocytes and lymphocytes of and autologously reintroduced into a human. Accordingly, delivery or administration according to the invention may he performed using plasma exosomes.

### Liposomes

[0626] Delivery or administration according to the invention can be performed with liposomes. Liposomes are spherical vesicle structures composed of a uni- or multilamellar lipid bilayer surrounding internal aqueous compartments and a relatively impermeable outer lipophilic phospholipid bilayer. Liposomes have gained considerable attention as drug delivery carriers because they are biocompatible, nontoxic, can deliver both hydrophilic and lipophilic drug molecules, protect their cargo from degradation by plasma enzymes, and transport their load across biological membranes and the blood brain barrier (BBB) (see, e.g., Spuch and Navarro, Journal of Drug Delivery, vol. 2011, Article ID 469679, 12 pages, 2011. doi:10.1155/2011/469679 for review).

[0627] Liposomes can be made from several different types of lipids; however, phospholipids are most commonly used to generate liposomes as drug carriers. Although liposome formation is spontaneous when a lipid film is mixed with an aqueous solution, it can also be expedited by applying force in the form of shaking by using a homogenizer, sonicator, or an extrusion apparatus (see, e.g., Spuch and Navarro, Journal of Drug Delivery, vol. 2011, Article ID 469679, 12 pages, 2011. doi:10.1155/2011/469679 for review).

[0628] Several other additives may be added to liposomes in order to modify their structure and properties. For instance, either cholesterol or sphingomyelin may be added to the liposomal mixture in order to help stabilize the liposomal structure and to prevent the leakage of the liposomal inner cargo. Further, liposomes are prepared from hydrogenated egg phosphatidylcholine or egg phosphatidylcholine, cholesterol, and dicetyl phosphate, and their mean vesicle sizes were adjusted to about 50 and 100 nm. (see, e.g., Spuch and Navarro, Journal of Drug Delivery, vol. 2011, Article ID 469679, 12 pages, 2011. doi:10.1155/2011/469679 for review).

[0629] A liposome formulation may be mainly comprised of natural phospholipids and lipids such as 1,2-distearoryl-sn-glycero-3-phosphatidyl choline (DSPC), sphingomyelin, egg phosphatidylcholines and monosialoganglioside. Since this formulation is made up of phospholipids only, liposomal formulations have encountered many challenges, one of the ones being the instability in plasma. Several attempts to overcome these challenges have been made, specifically in the manipulation of the lipid membrane. One of these attempts focused on the manipulation of cholesterol. Addition of cholesterol to conventional formulations reduces rapid release of the encapsulated bioactive compound into the plasma or 1,2-dioleoyl-sn-glycero-3-phosphoethanolamine (DOPE) increases the stability (see, e.g., Spuch and Navarro, Journal of Drug Delivery, vol. 2011, Article ID 469679, 12 pages, 2011. doi:10.1155/2011/469679 for review).

[0630] In a particularly advantageous embodiment, Trojan Horse liposomes known as Molecular Trojan Horses) are desirable and protocols may be found at cshprotocols.cshlp.org/content/2010/4/pdb.prot5407.long. These particles allow delivery of a transgene to the entire brain after an intravascular injection. Without being bound by limitation, it is believed that neutral lipid particles with specific antibodies conjugated to surface allow crossing of the blood brain barrier via endocytosis. Applicant postulates utilizing Trojan Horse Liposomes to deliver the CRISPR family of nucleases to the brain via an intravascular injection, which would allow whole brain transgenic animals without the need for embryonic manipulation. About 1-5 g of DNA or RNA may be contemplated for in vivo administration in liposomes.

[0631] In another embodiment, the nucleic acid-targeting system or conmponents thereof may be administered in liposomes, such as a stable nucleic-acid-lipid particle (SNALP) (see, e.g., Morrissey et al., Nature Biotechnology, Vol. 23, No. 8, August 2005). Daily intravenous injections of about 1, 3 or 5 mg/kg/day of a specific nucleic acid-targeting system targeted in a SNALP are contemplated. The daily treatment may be over about three days and then weekly for about five weeks. In another embodiment, a specific nucleic acid-targeting system encapsulated SNALP) administered by intravenous injection to at doses of about 1 or 2.5 mg/kg are also contemplated (see, e.g., Zimmerman et al., Nature Letters, Vol. 441, 4 May 2006). The SNALP formulation may contain the lipids 3-N-[(wmethoxypoly(ethylene glycol) 2000) carbamoyl]-1,2-dimyristyloxy-propylamine (PEG-C-DMA), 1,2-dilinoleyloxy-N,N-dimethyl-3-aminopropane (DLinDMA), 1,2-distearoyl-sn-glycero-3-phosphocholine (DSPC) and cholesterol, in a 2:40:10:48 molar per cent ratio (see, e.g., Zimmerman et al., Nature Letters, Vol. 441, 4 May 2006).

[0632] In another embodiment, stable nucleic-acid-lipid particles (SNALPs) have proven to be effective delivery molecules to highly vascularized HepG2-derived liver tumors but not in poorly vascularized HCT-116 derived liver tumors (see, e.g., Li, Gene Therapy (2012) 19, 775-780). The SNALP liposomes may be prepared by formulating D-Lin-DMA and PEG-C-DMA with distearoylphosphatidylcholine (DSPC), Cholesterol and siRNA using a 25:1 lipid/siRNA ratio and a 48/40/10/2 molar ratio of Cholesterol/D-Lin-DMA/DSPC/PEG-C-DMA. The resulted SNALP liposomes are about 80-100 nm in size.

[0633] In yet another embodiment, a SNALP may comprise synthetic cholesterol (Sigma-Aldrich, St Louis, Mo., USA), dipalmitoylphosphatidylcholine (Avanti Polar Lipids, Alabaster, Ala., USA), 3 -N-[(w-methoxy poly(ethylene glycol)2000)carbamoyl]-1,2-dimyrestyloxypropylamine, and cationic 1,2-dilinoleyloxy-3-N,Ndimethylaminopropane (see, e.g., Geisbert et at, Lancet 2010; 375: 1896-905). A dosage of about 2 mg/kg total nucleic acid-targeting systemper dose administered as, for example, a bolus intravenous infusion may be contemplated.

[0634] In yet another embodiment, a SNALP may comprise synthetic cholesterol (Sigma-Aldrich), 1,2-distearoyl-sn-glycero-3-phosphocholine (DSPC; Avanti Polar Lipids Inc.), PEG-cDMA, and 1,2-dilinoleyloxy-3-(N;N-dimethyl)aminopropane (DLinDMA) (see, e.g., Judge, J. Clin. Invest. 119:661-673 (2009)). Formulations used for in vivo studies may comprise a final lipid/RNA mass ratio of about 9:1.

[0635] The safety profile of RNAi nanomedicines has been reviewed by Barros and Gollob of Alnylam Pharmaceuticals (see, e.g., Advanced Drug Delivery Reviews 64 (2012) 1730-1737). The stable nucleic acid lipid particle (SNALP) is comprised of four different lipids—an ionizable lipid (DLinDMA) that is cationic at low pH, a neutral helper lipid, cholesterol, and a diffusible polyethylene glycol (PEG)-lipid. The particle is approximately 80 nm in diameter and is charge-neutral at physiologic pH. During formulation, the ionizable lipid serves to condense lipid with the anionic RNA during particle formation. When positively charged under increasingly acidic endosomal conditions, the ionizable lipid also mediates the fusion of SNALP with the endosomal membrane enabling release of RNA into the cytoplasm. The PEG-lipid stabilizes the particle and reduces aggregation during formulation, and subsequently provides a neutral hydrophilic exterior that improves pharmacokinetic properties.

[0636] To date, two clinical programs have been initiated using SNALP formulations with RNA. Tekmira Pharmaceuticals recently completed a phase I single-dose study of SNALP-ApoB in adult volunteers with elevated LDL cholesterol. ApoB is predominantly expressed in the liver and jejunum and is essential for the assembly and secretion of VLDL and LDL. Seventeen subjects received a single dose of SNALP-ApoB (dose escalation across 7 dose levels). There was no evidence of liver toxicity (anticipated as the potential dose-limiting toxicity based on preclinical studies). One (of two) subjects at the highest dose experienced flu-like symptoms consistent with immune system stimulation, and the decision was made to conclude the trial.

[0637] Alnylam Pharmaceuticals has similarly advanced ALN-TTR01, which employs the SNALP technology described above and targets hepatocyte production of both mutant and wild-type TTR to treat TTR amyloidosis (ATTR). Three ATTR syndromes have been described: familial amyloidotic polyneuropathy (FAP) and familial amyloidotic cardiomyopathy (FAC)—both caused by autosomal dominant mutations in TTR; and senile systemic amyloidosis (SSA) cause by wildtype TTR. A placebo-controlled, single dose-escalation phase I trial of ALN-TTR01 was recently completed in patients with ATTR. ALN-TTR01 was administered as a 15-minute IV infusion to 31 patients (23 with study drug and 8 with placebo) within a dose range of 0.01 to 1.0 mg/kg (based on siRNA). Treatment was well tolerated with no significant increases in liver function tests. Infusion-related reactions were noted in 3 of 23 patients at ≧0.4 mg/kg; all responded to slowing of the infusion rate and all continued on study. Minimal and transient elevations of serum cytokines IL-6, IP-10 and IL-1ra were noted in two patients at the highest dose of 1 mg/kg (as anticipated from preclinical and NHP studies). Lowering of serum TTR, the expected pharmacodynamics effect of ALN-TTR01, was observed at 1 mg/kg.

[0638] In yet another embodiment, a SNALP may be made by solubilizing a cationic lipid, DSPC, cholesterol and PEG-lipid e.g., in ethanol, e.g., at a molar ratio of 40:10:40:10, respectively (see, Semple et al, Nature Niotechnology, Volume 28 Number 2 February 2010, pp. 172-477). The lipid mixture was added to an aqueous buffer (50 mM citrate, pH 4) with mixing to a final ethanol and lipid concentration of 30% (vol/vol) and 6.1 mg/ml, respectively, and allowed to equilibrate at 22° C. for 2 min before extrusion. The hydrated lipids were extruded through two stacked 80 nm pore-sized filters (Nuclepore) at 22° C. using a Lipex Extruder (Northern Lipids) until a vesicle diameter of 70-90 nm, as determined by dynamic light scattering analysis, was obtained. This generally required 1-3 passes. The siRNA (solubilized in a 50 mM citrate, pH 4 aqueous solution containing 30% ethanol) was added to the pre-equilibrated (35° C.) vesicles at a rate of ˜5 ml/min with mixing. After a final target siRNAlipid ratio of 0.06 (wt/wt) was reached, the mixture was incubated for a further 30 min at 35° C. to allow vesicle reorganization and encapsulation of the siRNA. The ethanol was then removed and the external buffer replaced with PBS (155 mM NaCl, 3 mM Na₂HPO₄, 1 mM KH₂PO₄, pH 7.5) by either dialysis or tangential flow diafiltration. siRNA were encapsulated in SNALP using a controlled step-wise dilution method process. The lipid constituents of KC2-SNALP were DLin-KC2-DMA (cationic lipid), dipalmitoylphosphatidylcholine (DPPC; Avanti Polar Lipids), synthetic cholesterol (Sigma) and PEG-C-DMA used at a molar ratio of 57.1:7,1:34.3:1.4. Upon formation of the loaded particles, SNALP were dialyzed against PBS and filter sterilized through a 0.2 μm filter before use. Mean particle sizes were 75-85 nm and 90-95% of the siRNA was encapsulated within the lipid particles. The final siRNA/lipid ratio in formulations used for in vivo testing was ˜0.15 (wt/wt). LNP-siRNA systems containing Factor VII siRNA were diluted to the appropriate concentrations in sterile PBS immediately before use and the formulations were administered intravenously through the lateral tail vein in a total volume of 10 ml/kg. This method and these delivery systems may be extrapolated to the nucleic acid-targeting system of the present invention.

[0639] Other Lipids

[0640] Other cationic lipids, such as amino lipid 2,2-di linoleyl-4-dimethylaminoethyl-[1,3]-dioxolane (DLin-KC2-DMA) may be utilized to encapsulate nucleic acid-targeting system or components thereof or nucleic acid molecule(s) coding therefor e.g., similar to SiRNA (see, e.g., Jayaraman, Angew. Chem. Int. Ed. 2012, 51, 8529-8533), and hence may be employed in the practice of the invention. A preformed vesicle with the following lipid composition may be contemplated: amino lipid, distearoylphosphatidylcholine (DSPC), cholesterol and (R)-2,3-bis(octadecyloxy) propyl-1-(methoxy polyethylene glycol)2000)propylcarbamate (PEG-lipid) in the molar ratio 40/10/40/10, respectively, and a FVII siRNA/total lipid ratio of approximately 0.05 (w/w). To ensure a narrow particle size distribution in the range of 70-90 nm and a low polydispersity index of 0.11±0.04 (n=56), the particles may be extruded up to three times through 80 nm membranes prior to adding the guide RNA. Particles containing the highly potent amino lipid 16 may be used, in which the molar ratio of the four lipid components 16, DSPC, cholesterol and PEG-lipid (50/10/38.5/1.5) which may be further optimized to enhance in vivo activity.

[0641] Michael S D Kormann et al. (“Expression of therapeutic proteins after delivery of chemically modified mRNA in mice: Nature Biotechnology, Volume:29, Pages: 154-157 (20111) describes the use of lipid envelopes to deliver RNA. Use of lipid envelopes is also preferred in the present invention.

[0642] In another embodiment, lipids may be formulated with the nucleic acid-targeting system of the present invention or component(s) thereof or nucleic acid molecule(s) coding therefor to form lipid nanoparticles (LNPs). Lipids include, but are not limited to, DLin-KC2-DMA4, C12-200 and colipids disteroylphosphatidyl choline, cholesterol, and PEG-DIM may be formulated with RNA-targeting system instead of siRNA (see, e.g., Novobrantseva, Molecular Therapy—Nucleic Acids (2012) 1, e4; doi:10.1038/mtna.2011.3) using a spontaneous vesicle formation procedure. The component molar ratio may be about 50/10/38.5/1.5 (DLin-KC2-DMA or C12-200/disteroylphosphatidyl choline/cholesterol/PEG-DMG). The final lipid:siRNA weight ratio may be ˜12:1 and 9:1 in the case of DLin-KC2-DMA and C12-200 lipid particles (LNPs), respectively. The formulations may have mean particle diameters of ˜80 nm with >90% entrapment efficiency. A 3 mg/kg dose may be contemplated.

[0643] Tekmira has a portfolio of approximately 95 patent families, in the U.S. and abroad, that are directed to various aspects of LNPs and LNP formulations (see, e.g., U.S. Pat. Nos. 7,982,027; 7,799,565; 8,058,069; 8,283,333; 7,901,708; 7,745,651; 7,803,397; 8,101,741; 8,188,263; 7,915,399; 8,236,943 and 7,838,658 and European Pat. Nos 1766035; 1519714; 1781593 and 1664316), all of which may be used and/or adapted to the present invention.

[0644] The nucleic acid-targetingsystem or components thereof or nucleic acid molecule(s) coding therefor may be delivered encapsulated in PLGA Microspheres such as that further described in US published applications 20130252281 and 20130245107 and 20130244279 (assigned to Modema Therapeutics) which relate to aspects of formulation of compositions comprising modified nucleic acid molecules which may encode a protein, a protein precursor, or a partially or fully processed form of the protein or a protein precursor. The formulation may have a molar ratio 50:10:38.5:1.5-3.0 (cationic lipid:fusogenic lipid:cholesterol:PEG lipid). The PEG lipid may be selected from, but is not limited to PEG-c-DOMG, PEG-DMG. The fusogenic lipid may be DSPC. See also, Schrum et al., Delivery and Formulation of Engineered Nucleic Acids, US published application 20120251618.

[0645] Nanomerics' technology addresses bioavailability challenges for a broad range of therapeutics, including low molecular weight hydrophobic drugs, peptides, and nucleic acid based therapeutics (plasmid, siRNA, miRNA). Specific administration routes for which the technology has demonstrated clear advantages include the oral route, transport across the blood-brain-barrier, delivery to solid tumours, as well as to the eye. See, e.g., Mazza et al., 2013, ACS Nano. 2013 Feb. 26; 7(2):1016-26; Uchegbu and Siew, 2013, J Pharrn Sci. 102(2):305-10 and Lalatsa et al., 2012, J Control Release. 2012 Jul. 20; 161(2):523-36.

[0646] US Patent Publication No. 20050019923 describes cationic dendrimers for delivering bioactive molecules, such as polynucleotide molecules, peptides and polypeptides and/or pharmaceutical agents, to a mammalian body. The dendrimers are suitable for targeting the delivery of the bioactive molecules to, for example, the liver, spleen, lung, kidney or heart (or even the brain). Dendrimers are synthetic 3-dimensional macromolecules that are prepared in a step-wise fashion from simple branched monomer units, the nature and functionality of which can be easily controlled and varied. Dendrimers are synthesized from the repeated addition of building blocks to a multifunctional core (divergent approach to synthesis), or towards a multifunctional core (convergent approach to synthesis) and each addition of a 3-dimensional shell of building blocks leads to the formation of a higher generation of the dendrimers. P′olypropylenimine dendrimers start from a diaminobutane core to which is added twice the number of amino groups by a double Michael addition of acrylonitrile to the primary amines followed by the hydrogenation of the nitriles. This results in a doubling of the amino groups. Polypropylenimine dendrimers contain 100% protonable nitrogens and up to 64 terminal amino groups (generation 5, DAB 64). Protonable groups are usually amine groups which are able to accept protons at neutral pH. The use of dendrimers as gene delivery agents has largely focused on the use of the polyamidoamine. and phosphorous containing compounds with a mixture of amine/amide or N—P(O₂)S as the conjugating units respectively with no work being reported on the use of the lower generation polypropylenimine dendrimers for gene delivery. Polypropylenimine dendrimers have also been studied as pH sensitive controlled release systems for drug delivery and for their encapsulation of guest molecules when chemically modified by peripheral amino acid groups. The cytotoxicity and interaction of polypropylenimine dendrimers with DNA as well as the transfection efficacy of DAB 64 has also been studied.

[0647] US Patent Publication No. 20050019923 is based upon the observation that, contrary to earlier reports, cationic dendrimers, such as polypropylenimine dendrimers, display suitable properties, such as specific targeting and low toxicity, for use in the targeted delivery of bioactive molecules, such as genetic material. In addition, derivatives of the cationic dendrimer also display suitable properties for the targeted delivery of bioactive molecules. See also, Bioactive Polymers, US published application 20080267903, which discloses “Various polymers, including cationic polyamine polymers and dendrimeric polymers, are shown to possess anti-proliferative activity, and may therefore be useful for treatment of disorders characterised by undesirable cellular proliferation such as neoplasms and tumours, inflammatory disorders (including autoimmune disorders), psoriasis and atherosclerosis. The polymers may he used alone as active agents, or as delivery vehicles for other therapeutic agents, such as drug molecules or nucleic acids for gene therapy. In such cases, the polymers' own intrinsic anti-tumour activity may complement the activity of the agent to be delivered.” The disclosures of these patent publications may be employed in conjunction with herein teachings for delivery of nucleic acid-targetingsystem(s) or component(s) thereof or nucleic acid molecule(s) coding therefor.

### Supercharged Proteins

[0648] Supercharged proteins are a class of engineered or naturally occurring proteins with unusually high positive or negative net theoretical charge and may be employed in delivery of nucleic acid-targetingsystem(s) or component(s) thereof or nucleic acid molecule(s) coding therefor. Both supernegatively and superpositively charged proteins exhibit a remarkable ability to withstand thermally or chemically induced aggregation. Superpositively charged proteins are also able to penetrate mammalian cells. Associating cargo with these proteins, such as plasmid DNA, RNA, or other proteins, can enable the functional delivery of these macromolecules into mammalian cells both in vitro and in vivo. David Liu's lab reported the creation and characterization of supercharged proteins in 2007 (Lawrence et al., 2007, Journal of the American Chemical Society 129, 10110-10112).

[0649] The nonviral delivery of RNA and plasmid DNA into mammalian cells are valuable both for research and therapeutic applications (Akinc et al., 2010, Nat, Biotech. 26, 561-569). Purified +36 GFP protein (or other superpositively charged protein) is mixed with RNAs in the appropriate serum-free media and allowed to complex prior addition to cells. Inclusion of serum at this stage inhibits formation of the supercharged protein-RNA complexes and reduces the effectiveness of the treatment. The following protocol has been found to be effective for a variety of cell lines (McNaughton et al., 2009, Proc. Natl. Acad. Sci. USA 106, 6111-6116). However, pilot experiments varying the dose of protein and RNA should be performed to optimize the procedure for specific cell lines.

[0650] (1) One day before treatment, plate 1×10⁵ cells per well in a 48-well plate.

[0651] (2) On the day of treatment, dilute purified +36 GFP protein in serumfree media to a final concentration 200 nM. Add RNA to a final concentration of 50 nM. Vortex to mix and incubate at room temperature for 10 min.

[0652] (3) During incubation, aspirate media from cells and wash once with PBS.

[0653] (4) Following incubation of +36 GFP and. RNA, add the protein-RNA complexes to cells.

[0654] (5) Incubate cells with complexes at 37 ° C. for 4 h.

[0655] (6) Following incubation, aspirate the media and wash three times with 20 U/mL heparin PBS. Incubate cells with serum-containing media for a further 48 h or longer depending upon the assay for activity.

[0656] (7) Analyze cells by immunoblot, qPCR, phenotypic assay, or other appropriate method.

[0657] David Liu's lab has further found +36 GFP to be an effective plasmid delivery reagent in a range of cells. As plasmid DNA is a larger cargo than siRNA, proportionately more +36 GFP protein is required to effectively complex plasmids. For effective plasmid delivery Applicants have developed a variant of +36 GFP bearing a C-terminal HA2 peptide tag, a known endosome-disrupting peptide derived from the influenza virus hemagglutinin protein. The following protocol has been effective in a variety of cells, but as above it is advised that plasmid DNA and supercharged protein doses be optimized for specific cell lines and delivery applications.

[0658] (1) One day before treatment, plate 1×10⁵ per well in a 48-well plate.

[0659] (2) On the day of treatment, dilute purified k36 GFP protein in serumfree media to a final concentration 2 mM. Add 1mg of plasmid DNA. Vortex to mix and incubate at room temperature for 10 min.

[0660] (3) During incubation, aspirate media from cells and wash once with PBS.

[0661] (4) Following incubation of b36 GFP and plasmid DNA, gently add the protein-DNA complexes to cells.

[0662] (5) Incubate cells with complexes at 37 C for 4 h.

[0663] (6) Following incubation, aspirate the media and wash with PBS. Incubate cells in serum-containing media and incubate for a further 24-48 h.

[0664] (7) Analyze plasmid delivery (e.g., by plasmid-driven gene expression) as appropriate.

[0665] See also, e.g., McNaughton et al., Proc. Natl. Acad. Sci. USA 106, 6111-6116 (2009); Cronican et al., ACS Chemical Biology 5, 747-752 (2010); Cronica.n et al., Chemistry &. Biology 18, 833-838 (2011); Thompson et Methods in Enzymology 503, 293-319 (2012); Thompson, D. B., et al., Chemistry & Biology 19 (7), 831-843 (2012). The methods of the super charged proteins may be used and/or adapted for delivery of the nucleic acid-targeting system of the present invention. These systems of Dr. Lui and documents herein in conjunction with herein teachings can be employed in the delivery of nucleic acid-targeting system(s) or component(s) thereof or nucleic acid molecule(s) coding therefor.

### Cell Penetrating Peptides (CPPs)

[0666] In yet another embodiment, cell penetrating peptides (CPPs) are contemplated for the delivery of the CRISPR Cas system. CPPs are short peptides that facilitate cellular uptake of various molecular cargo (from nanosize particles to small chemical molecules and large fragments of DNA). The term “cargo” as used herein includes but is not limited to the group consisting of therapeutic agents, diagnostic probes, peptides, nucleic acids, antisense oligonucleotides, plasmids, proteins, particles including nanoparticles, liposomes, chromophores, small molecules and radioactive materials. in aspects of the invention, the cargo may also comprise any component of the CRISPR Cas system or the entire functional CRISPR Cas system. Aspects of the present invention further provide methods for delivering a desired cargo into a subject comprising: (a) preparing a complex comprising the cell penetrating peptide of the present invention and a desired cargo, and (b) orally, intraarticularly, intraperitoneally, intrathecally, intrarterially, intranasally, intraparenchymally, subcutaneously, intramuscularly, intravenously, dermally, intrarectally, or topically administering the complex to a subject. The cargo is associated with the peptides either through chemical linkage via covalent bonds or through non-covalent interactions.

[0667] The function of the CPPs are to deliver the cargo into cells, a process that commonly occurs through endocytosis with the cargo delivered to the endosomes of living mammalian cells. Cell-penetrating peptides are of different sizes, amino acid sequences, and charges but all CPPs have one distinct characteristic, which is the ability to translocate the plasma membrane and facilitate the delivery of various molecular cargoes to the cytoplasm or an organelle. CPP translocation may be classified into three main entry mechanisms: direct penetration in the membrane, endocytosis-mediated entry, and translocation through the formation of a transitory structure. CPPs have found numerous applications in medicine as drug delivery agents in the treatment of different diseases including cancer and virus inhibitors, as well as contrast agents for cell labeling. Examples of the latter include acting as a carrier for GFP, MRI contrast agents, or quantum dots. CPPs hold great potential as in vitro and in vivo delivery vectors for use in research and medicine. CP:Ps typically have an amino acid composition that either contains a high relative abundance of positively charged amino acids such as lysine or arginine or has sequences that contain an alternating pattern of polar/charged amino acids and non-polar, hydrophobic amino acids. These two types of structures are referred to as polycationic or amphipathic, respectively. A third class of CPPs are the hydrophobic peptides, containing only apolar residues, with low net charge or have hydrophobic amino acid groups that are crucial for cellular uptake. One of the initial CPPs discovered was the trans-activating transcriptional activator (Tat) from Human Immunodeficiency Virus 1 (HIV-1) which was found to be efficiently taken up from the surrounding media by numerous cell types in culture. Since then, the number of known CPPs has expanded considerably and small molecule synthetic analogues with more effective protein transduction properties have been generated. CPPs include but are not limited to Penetratin, Tat (48-60), Transportan, and ((R-AhX-R)4) (Ahx=aminohexanoyl) (SEQ ID NO: 23).

[0668] U.S. Pat. No. 8,372,951, provides a CPP derived from eosinophil cationic protein (ECP) which exhibits highly cell-penetrating efficiency and low toxicity. Aspects of delivering the CPP with its cargo into a vertebrate subject are also provided. Further aspects of CP:Ps and their delivery are described in U.S. Pat. Nos. 8,575,305; 8;614,194 and 8,044,019. CPPs can be used to deliver the CRISPR-Cas system or components thereof. That CPPs can be employed to deliver the CRISPR-Cas system or components thereof is also provided in the manuscript “Gene disruption by cell-penetrating peptide-mediated delivery of Ca.s9 protein and guide RNA”, by. Suresh Ramakrishna, Abu-Bonsrah Kwaku Dad, Jagadish Beloor, et al. Genome Res. 2014 Apr. 2. [Epub ahead of print], incorporated by reference in its entirety, wherein it is demonstrated that treatment with CPP-conjugated recombinant Cas9 protein and CPP-complexed guide RNAs lead to endogenous gene disruptions in human cell lines. In the paper the Cas9 protein was conjugated. to CPP via a thioether bond, whereas the guide RNA was complexed with CPP, forming condensed, positively charged particles. It was shown that simultaneous and sequential treatment of human cells, including embryonic stern cells, dermal fibroblasts, HEK293T cells, HeLa cells, and embryonic carcinoma cells, with the modified Cas9 and guide RNA led to efficient gene disruptions with reduced off-target mutations relative to plasmid transfections.

### Implantable Devices

[0669] In another embodiment, implantable devices are also contemplated for delivery of the nucleic acid-targeting system or component(s) thereof or nucleic acid molecule(s) coding therefor. For example, US Patent Publication 20110195123 discloses an implantable medical device which elutes a drug locally and in prolonged period is provided, including several types of such a device, the treatment modes of implementation and methods of implantation. The device comprising of polymeric substrate, such as a matrix for example, that is used as the device body, and drugs, and in some cases additional scaffolding materials, such as metals or additional polymers, and materials to enhance visibility and imaging. An implantable delivery device can be advantageous in providing release locally and over a prolonged period, where drug is released directly to the extracellular matrix (ECM) of the diseased area such as tumor, inflammation, degeneration or for symptomatic objectives, or to injured smooth muscle cells, or for prevention. One kind of drug is RNA, as disclosed above, and this system may be used/and or adapted to the nucleic acid-targeting system of the present invention. The modes of implantation in some embodiments are existing implantation procedures that are developed and used today for other treatments, including brachytherapy and needle biopsy. In such cases the dimensions of the new implant described in this invention are similar to the original implant. Typically a few devices are implanted during the same treatment procedure.

[0670] US Patent Publication 20110195123, provides a drug delivery implantable or insertable system, including systems applicable to a cavity such as the abdominal cavity and/or any other type of administration in which the drug delivery system is not anchored or attached, comprising a biostable and/or degradable and/or bioabsorbable polymeric substrate, which may for example optionally be a matrix. It should be noted that the term “insertion” also includes implantation. The drug delivery system is preferably implemented as a “Coder” as described in US Patent Publication 20110195123.

[0671] The polymer or plurality of polymers are biocompatible, incorporating an agent and/or plurality of agents, enabling the release of agent at a controlled rate, wherein the total volume of the polymeric substrate, such as a matrix for example, in some embodiments is optionally and preferably no greater than a maximum volume that permits a therapeutic level of the agent to be reached. As a non-limiting example, such a volume is preferably within the range of 0.1 m³ to 1000 mm³, as required by the volume for the agent load. The Loder may optionally be larger, for example when incorporated with a device whose size is determined by functionality, for example and without limitation, a knee joint, an intra-uterine or cervical ring and the like.

[0672] The drug delivery system (for delivering the composition) is designed in some embodiments to preferably employ degradable polymers, wherein the main release mechanism is bulk erosion; or in some embodiments, non degradable, or slowly degraded polymers are used, wherein the main release mechanism is diffusion rather than bulk erosion, so that the outer part functions as membrane, and its internal part functions as a drug reservoir, which practically is not affected by the surroundings for an extended period (for example from about a week to about a few months). Combinations of different polymers with different release mechanisms may also optionally be used. The concentration gradient at the surface is preferably maintained effectively constant during a significant period of the total drug releasing period, and therefore the diffusion rate is effectively constant (termed “zero mode” diffusion). By the term “constant” it is meant a. diffusion rate that is preferably maintained above the lower threshold of therapeutic effectiveness, but which may still optionally feature an initial burst and/or may fluctuate, for example increasing and decreasing to a certain degree. The diffusion rate is preferably so maintained for a prolonged period, and it can be considered constant to a certain level to optimize the therapeutically effective period, for example the effective silencing period.

[0673] The drug delivery system optionally and preferably is designed to shield the nucleotide based therapeutic agent from degradation, whether chemical in nature or due to attack from enzymes and other factors in the body of the subject.

[0674] The drug delivery system of US Patent Publication 20110195123 is optionally associated with sensing and/or activation appliances that are operated at and/or after implantation of the device, by non and/or minimally invasive methods of activation and/or acceleration/deceleration, for example optionally including but not limited to thermal heating and cooling, laser beams, and ultrasonic, including focused ultrasound and/or RF (radiofrequency) methods or devices.

[0675] According to some embodiments of US Patent Publication 20110195123, the site for local delivery may optionally include target sites characterized by high abnormal proliferation of cells, and suppressed apoptosis, including tumors, active and or chronic inflammation and infection including autoimmune diseases states, degenerating tissue including muscle and nervous tissue, chronic pain, degenerative sites, and location of bone fractures and other wound locations for enhancement of regeneration of tissue, and injured cardiac, smooth and striated muscle.

[0676] The site for implantation of the composition, or target site, preferably features a radius, area and/or volume that is sufficiently small for targeted local delivery. For example, the target site optionally has a diameter in a range of from about 0.1 mm to about 5 cm.

[0677] The location of the target site is preferably selected for maximum therapeutic efficacy. For example, the composition of the drug delivery system (optionally with a device for implantation as described above) is optionally and preferably implanted within or in the proximity of a tumor environment, or the blood supply associated thereof.

[0678] For example the composition (optionally with the device) is optionally implanted within or in the proximity to pancreas, prostate, breast, liver, via the nipple, within the vascular system and so forth.

[0679] The target location is optionally selected from the group comprising, consisting essentially of, or consisting of (as non-limiting examples only, as optionally any site within the body may be suitable for implanting a Loder): 1. brain at degenerative sites like in Parkinson or Alzheimer disease at the basal ganglia, white and gray matter; 2. spine as in the case of amyotrophic lateral sclerosis (ALS); 3. uterine cervix to prevent HPV infection; 4. active and chronic inflammatory joints; 5. dermis as in the case of psoriasis; 6. sympathetic and sensoric nervous sites for analgesic effect; 7. intra osseous implantation; 8. acute and chronic infection sites; 9. Intra vaginal; 10. Inner ear--auditory system, labyrinth of the inner ear, vestibular system; 11. Intra tracheal; 12. Intra-cardiac; coronary, epicardiac; 13. urinary bladder; 14. biliary system; 15. parenchymal tissue including and not limited to the kidney, liver, spleen; 16. lymph nodes; 17. salivary glands; 18. dental gums; 19. :Intra-articular (into joints); 20. Intra-ocular; 21. Brain tissue; 22. Brain ventricles; 23. Cavities, including abdominal cavity (for example but without limitation, for ovary cancer); 24, :Intra esophageal and 25. Intra rectal.

[0680] Optionally insertion of the system (for example a device containing the composition) is associated with injection of material to the ECM at the target site and the vicinity of that site to affect local pH and/or temperature and/or other biological factors affecting the diffusion of the drug and/or drug kinetics in the ECM, of the target site and the vicinity of such a site.

[0681] Optionally, according to some embodiments, the release of said agent could be associated with sensing and/or activation appliances that are operated prior and/or at and/or after insertion, by non and/or minimally invasive and/or else methods of activation and/or acceleration/deceleration, including laser beam, radiation, thermal heating and cooling, and ultrasonic, including focused ultrasound and/or RF (radiofrequency) methods or devices, and chemical activators.

[0682] According to other embodiments of U.S. Patent Publication 20110195123, the drug preferably comprises a RNA, for example for localized cancer cases in breast, pancreas, brain, kidney, bladder, lung, and prostate as described below. Although exemplified with RNAi, many drugs are applicable to be encapsulated in Loder, and can be used in association with this invention, as long as such drugs can be encapsulated with the Loder substrate, such as a matrix for example, and this system may be used and/or adapted to deliver the nucleic acid-targeting system of the present invention.

[0683] As another example of a specific application, neuro and muscular degenerative diseases develop due to abnormal gene expression. Local delivery of RNAs may have therapeutic properties for interfering with such abnormal gene expression. Local delivery of anti apoptotic, anti inflammatory and anti degenerative drugs including small drugs and macromolecules may also optionally be therapeutic. In such cases the Loder is applied for prolonged release at constant rate and/or through a dedicated device that is implanted separately. All of this may be used and/or adapted to the nucleic acid-targeting system of the present invention.

[0684] As yet another example of a specific application, psychiatric and cognitive disorders are treated with gene modifiers. Gene knockdown is a treatment option. Loders locally delivering agents to central nervous system sites are therapeutic options for psychiatric and cognitive disorders including but not limited to psychosis, hi-polar diseases, neurotic disorders and behavioral maladies. The Loders could also deliver locally drugs including small drugs and macromolecules upon implantation at specific brain sites. All of this may he used and/or adapted to the nucleic acid-targeting system of the present invention.

[0685] As another example of a specific application, silencing of innate and/or adaptive immune mediators at local sites enables the prevention of organ transplant rejection. Local delivery of RNAs and immunomodulating reagents with the Loder implanted into the transplanted organ and/or the implanted site renders local immune suppression by repelling immune cells such as CD8 activated against the transplanted organ. All of this may be used/and or adapted to the nucleic acid-targeting system of the present invention.

[0686] As another example of a specific application, vascular growth factors including VEGFs and angiogenin and others are essential for neovascularization. Local delivery of the factors, peptides, peptidomimetics, or suppressing their repressors is an important therapeutic modality; silencing the repressors and local delivery of the factors, peptides, macromolecules and small drugs stimulating angiogenesis with the Loder is therapeutic for peripheral, systemic and cardiac vascular disease.

[0687] The method of insertion, such as implantation, may optionally already be used for other types of tissue implantation and/or for insertions and/or for sampling tissues, optionally without modifications, or alternatively optionally only with non-major modifications in such methods. Such methods optionally include but are not limited to brachytherapy methods, biopsy, endoscopy with and/or without ultrasound, such as ERCP, stereotactic methods into the brain tissue, Laparoscopy, including implantation with a laparoscope into joints, abdominal organs, the bladder wall and body cavities.

[0688] Implantable device technology herein discussed can be employed with herein teachings and hence by this disclosure and the knowledge in the art. CRISPR-Cas system or components thereof or nucleic acid molecules thereof or encoding or providing components may be delivered via an implantable device.

### Patient-Specific Screening Methods

[0689] A nucleic acid-targeting system that targets RNA, e.g., trinucleotide repeats can be used to screen patients or patent samples for the presence of such repeats. The repeats can be the target of the RNA of the nucleic acid-targeting system, and if there is binding thereto by the nucleic acid-targeting system, that binding can be detected, to thereby indicate that such a repeat is present. Thus, a nucleic acid-targeting system can be used to screen patients or patient samples for the presence of the repeat. The patient can then be administered suitable compound(s) to address the condition; or, can be administered a nucleic acid-targeting system to bind to and cause insertion, deletion or mutation and alleviate the condition.

[0690] The invention uses nucleic acids to bind target RNA sequences.

CRISPR Effector Protein mRNA and Guide RNA

[0691] CRISPR effector protein mRNA and guide RNA might also be delivered separately. CRISPR effector protein rnRNA can be delivered prior to the guide RNA to give time for CRISPR effector protein to be expressed. CRISPR effector protein mRNA might be administered 1-12 hours (preferably around 2-6 hours) prior to the administration of guide RNA.

[0692] Alternatively, CRISPR effector protein mRNA and guide RNA can be administered together. Advantageously, a second booster dose of guide RNA can be administered 1-12 hours (preferably around 2-6 hours) after the initial administration of CRISPR. effector protein mRNA+guide RNA.

[0693] The CRISPR effector protein of the present invention, i.e. a C2c2 effector protein is sometimes referred to herein as a CRISPR Enzyme. It will be appreciated that the effector protein is based on or derived from an enzyme, so the term ‘effector protein’ certainly includes ‘enzyme’ in some embodiments. However, it will also be appreciated that the effector protein may, as required in some embodiments, have DNA or RNA binding, but not necessarily cutting or nicking, activity, including a dead-Cas effector protein function.

[0694] Additional administrations of CRISPR effector protein mRNA and/or guide RNA might be useful to achieve the most efficient levels of genome modification. In some embodiments, phenotypic alteration is preferably the result of genome modification when a genetic disease is targeted, especially in methods of therapy and preferably where a repair template is provided to correct or alter the phenotype.

[0695] In some embodiments diseases that may be targeted include those concerned with disease-causing splice defects.

[0696] In some embodiments, cellular targets include Hemopoietic Stem/Progenitor Cells (CD34+); Human T cells; and Eye (retinal cells)—for example photoreceptor precursor cells.

[0697] In some embodiments Gene targets include: Human Beta Globin—HBB (for treating Sickle Cell Anemia, including by stimulating gene-conversion (using closely related HBD gene as an endogenous template)); CD3 (T-Cells); and CEP920—retina (eye).

[0698] In some embodiments disease targets also include: cancer; Sickle Cell Anemia (based on a point mutation); HIV; Beta-Thalassemia; and ophthalmic or ocular disease for example Leber Congenital Atnaurosis (LCA)-causing Splice Defect.

[0699] In some embodiments delivery methods include: Cationic Lipid Mediated “direct” delivery of Enzyme-Guide complex (RiboNucleoProtein) and electroporation of plastnid DNA.

[0700] Inventive methods can further comprise delivery of templates, such as repair templates, which may be dsODN or ssODN, see below. Delivery of templates may be via the cotemporaneous or separate from delivery of any or all the CRISPR effector protein or guide and via the same delivery mechanism or different. In some embodiments, it is preferred that the template is delivered together with the guide, and, preferably, also the CRISPR effector protein. An example may be an AAV vector.

[0701] Inventive methods can further comprise: (a) delivering to the cell a double-stranded oligodeoxynucleotide (dsODN) comprising overhangs complimentary to the overhangs created by said double strand break, wherein said dsODN is integrated into the locus of interest; or—(b) delivering to the cell a single-stranded oligodeoxynucleotide (ssODN), wherein said ssODN acts as a template for homology directed repair of said double strand break. Inventive methods can be for the prevention or treatment of disease in an individual, optionally wherein said disease is caused by a defect in said locus of interest. Inventive methods can be conducted in vivo in the individual or ex vivo on a cell taken from the individual, optionally wherein said cell is returned to the individual.

[0702] For minimization of toxicity and off-target effect, it will be important to control the concentration of CRISPR effector protein mRNA and guide RNA delivered. Optimal concentrations of CRISPR effector protein mRNA and guide RNA can be determined by testing different concentrations in a cellular or animal model and using deep sequencing the analyze the extent of modification at potential off-target genomic loci. For example, for the guide sequence targeting 5′-GAGTCCGAGCAGAAGAAGAA-3′ (SEQ ID NO: 24) in the EMX1 gene of the human genome, deep sequencing can be used to assess the level of modification at the following two off-target loci, 1: 5′-GAGTCCTAGCAGGAGAAGAA-3′ (SEQ ID NO: 25) and 2: 5′-GAGTCTAAGCAGAAGAAGAA-3′ (SEQ ID NO: 26). The concentration that gives the highest level of on-target modification while minimizing the level of off-target modification should be chosen for in vivo delivery.

### Inducible Systems

[0703] In some embodiments, a CRISPR effector protein may form a component of an inducible system. The inducible nature of the system would allow for spatiotemporal control of gene editing or gene expression using a form of energy. The form of energy may include but is not limited to electromagnetic radiation, sound energy, chemical energy and thermal energy. Examples of inducible system include tetracycline inducible promoters (Tet-On or Tet-Off), small molecule two-hybrid transcription activations systems (FKBP, ABA, etc), or light inducible systems (Phytochrome, LOV domains, or cryptochrome). In one embodiment, the CRISPR effector protein may be a part of a Light Inducible Transcriptional Effector (LITE) to direct changes in transcriptional activity in a sequence-specific manner. The components of a light may include a CRISPR effector protein, a light-responsive cytochrome heterodimer (e.g. from Arabidopsis thaliana), and a transcriptional activation/repression domain. Further examples of inducible DNA binding proteins and methods for their use are provided in U.S. 61/736465 and U.S. 61/721,283,and WO 2014018423 A2 which is hereby incorporated by reference in its entirety.

### Exemplary Methods of Using of CRISPR Cas System

[0704] The invention provides a non-naturally occurring or engineered composition, or one or more polynucleotides encoding components of said composition, or vector or delivery systems comprising one or more polynucleotides encoding components of said composition for use in a modifying a target cell in vivo, ex vivo or in vitro and, may be conducted in a manner alters the cell such that once modified the progeny or cell line of the CRISPR modified cell retains the altered phenotype. The modified cells and progeny may be part of a multi-cellular organism such as a plant or animal with ex vivo or in vivo application of CRISPR system to desired cell types. The CRISPR invention may be a therapeutic method of treatment. The therapeutic method of treatment may comprise gene or genome editing, or gene therapy.

Modifying a Target with CRISPR Cas System or Complex (e.g., C2c2-RNA Complex)

[0705] In one aspect, the invention provides for methods of modifying a target polynucleotide in a eukaryotic cell, which may be in vivo, ex vivo or in vitro. In some embodiments, the method comprises sampling a cell or population of cells from a human or non-human animal, and modifying the cell or cells. Culturing may occur at any stage ex vivo. The cell or cells may even be re-introduced into the non-human animal or plant. For re-introduced cells it is particularly preferred that the cells are stem cells.

[0706] In some embodiments, the method comprises allowing a CRISPR complex to bind to the target polynucleotide to effect cleavage of said target polynucleotide thereby modifying the target polynucleotide, wherein the CRISPR complex comprises a CRISPR effector protein complexed with a guide sequence hybridized or hybridizable to a target sequence within said target polynucleotide.

[0707] In one aspect, the invention provides a method of modifying expression of a polynucleotide in a eukaryotic cell. In some embodiments, the method comprises allowing a CRISPR complex to bind to the polynucleotide such that said binding results in increased or decreased expression of said polynucleotide; wherein the CRISPR complex comprises a CRISPR, effector protein complexed with a guide sequence hybridized or hybridizable to a target sequence within said polynucleotide. Similar considerations and conditions apply as above for methods of modifying a target polynucleotide. in fact, these sampling, culturing and re-introduction options apply across the aspects of the present invention.

[0708] Indeed, in any aspect of the invention, the CRISPR complex may comprise a CRISPR effector protein complexed with a guide sequence hybridized or hybridizable to a target sequence. Similar considerations and conditions apply as above for methods of modifying a target polynucleotide.

[0709] Thus in any of the non-naturally-occurring CRISPR effector proteins described herein comprise at least one modification and whereby the effector protein has certain improved capabilities. In particular, any of the effector proteins are capable of forming a CRISPR complex with a guide RNA. When such a complex forms, the guide RNA is capable of binding to a target polynucleotide sequence and the effector protein is capable of modifying a target locus. In addition, the effector protein in the CRISPR complex has reduced capability of modifying one or more off-target loci as compared to an unmodified enzyme/effector protein.

[0710] In addition, the modified CRISPR enzymes described herein encompass enzymes whereby in the CRISPR complex the effector protein has increased capability of modifying the one or more target loci as compared to an unmodified enzyme/effector protein. Such function may be provided separate to or provided in combination with the above-described function of reduced capability of modifying one or more off-target loci. Any such effector proteins may be provided with any of the further modifications to the CRISPR effector protein as described herein, such as in combination with any activity provided by one or more associated heterologous functional domains, any further mutations to reduce nuclease activity and the like.

[0711] In advantageous embodiments of the invention, the modified CRISPR effector protein is provided with reduced capability of modifying one or more off-target loci as compared to an unmodified enzyme/effector protein and increased capability of modifying the one or more target loci as compared to an unmodified enzyme/effector protein. In combination with further modifications to the effector protein, significantly enhanced specificity may be achieved. For example, combination of such advantageous embodiments with one or more additional mutations is provided wherein the one or more additional mutations are in one or more catalytically active domains. In such effector proteins, enhanced specificity may be achieved due to an improved specificity in terms of effector protein activity.

[0712] Modifications to reduce off-target effects and/or enhance on-target effects as described above may be made to amino acid residues located in a positively-charged region/groove situated between the RuvC-III and HNH domains. It will be appreciated that any of the functional effects described above may be achieved by modification of amino acids within the aforementioned groove but also by modification of amino acids adjacent to or outside of that groove.

[0713] Additional functionalities which may be engineered into modified CRISPR effector proteins as described herein include the following. 1. modified CRISPR effector proteins that disrupt DNA:protein interactions without affecting protein tertiary or secondary structure. This includes residues that contact any part of the RNA:DNA duplex. 2. modified CRISPI?, effector proteins that weaken intra-protein interactions holding C2c2 in conformation essential for nuclease cutting in response to DNA binding (on or off target). For example: a modification that mildly inhibits, but still allows, the nuclease conformation of the HNH domain (positioned at the scissile phosphate), 3, modified CRISPR. effector proteins that strengthen intra-protein interactions holding C2c2 in a conformation inhibiting nuclease activity in response to DNA binding (on or off targets). For example: a modification that stabilizes the HNH domain in a conformation away from the scissile phosphate. Any such additional functional enhancement may be provided in combination with any other modification to the CRISPR effector protein as described in detail elsewhere herein.

[0714] Any of the herein described improved functionalities may be made to any CRISPR effector protein, such as a C2c2 effector protein. However, it will be appreciated that any of the functionalities described herein may be engineered into C2c2 effector proteins from other orthologs, including chimeric effector proteins comprising fragments from multiple orthologs.

[0715] The invention uses nucleic acids to bind target DNA sequences. This is advantageous as nucleic acids are much easier and cheaper to produce than proteins, and the specificity can be varied according to the length of the stretch where homology is sought. Complex 3-D positioning of multiple fingers, for example is not required. The terms “polynucleotide”, “nucleotide”, “nucleotide sequence”, “nucleic acid” and “oligonucleotide” are used interchangeably. They refer to a polymeric form of nucleotides of any length, either deoxyribonucleotides or ribonucleotides, or analogs thereof. Polynucleotides may have any three dimensional structure, and may perform any function, known or unknown. The following are non-limiting examples of polynucleotides: coding or non-coding regions of a gene or gene fragment, loci (locus) defined from linkage analysis, exons, introns, messenger RNA (mRNA), transfer RNA, ribosomal RNA, short interfering RNA (siRNA), short-hairpin RNA (shRNA), micro-RNA (miRNA), ribozymes, cDNA, recombinant polynucleotides, branched polynucleotides, plasmids, vectors, isolated DNA of any sequence, isolated RNA of any sequence, nucleic acid probes, and primers. The term also encompasses nucleic-acid-like structures with synthetic backbones, see, e.g., Eckstein, 1991; Baserga et al,, 1992; Milligan, 1993; WO 97/03211; WO 96/39154; Mata, 1997; Strauss-Soukup, 1997; and Samstag, 1996. A polynucleotide may comprise one or more modified nucleotides, such as methylated nucleotides and nucleotide analogs. If present, modifications to the nucleotide structure may be imparted before or after assembly of the polymer. The sequence of nucleotides may be interrupted by non-nucleotide components. A polynucleotide may be further modified after polymerization, such as by conjugation with a labeling component. As used herein the term “wild type” is a term of the art understood by skilled persons and means the typical form of an organism, strain, gene or characteristic as it occurs in nature as distinguished from mutant or variant forms. A “wild type” can be a base line. As used herein the term “variant” should be taken to mean the exhibition of qualities that have a pattern that deviates from what occurs in nature. The terms “non-naturally occurring” or “engineered” are used interchangeably and indicate the involvement of the hand of man. The terms, when referring to nucleic acid molecules or polypeptides mean that the nucleic acid molecule or the polypeptide is at least substantially free from at least one other component with which they are naturally associated in nature and as found in nature, “Complementarity” refers to the ability of a nucleic acid to form hydrogen bond(s) with another nucleic acid sequence by either traditional Watson-Crick base pairing or other non-traditional types. A percent complementarity indicates the percentage of residues in a nucleic acid molecule which can form hydrogen bonds (e.g., Watson-Crick base pairing) with a second nucleic acid sequence (e.g., 5, 6, 7, 8, 9, 10 out of 10 being 50%, 60%, 70%, 80%, 90%, and 100% complementary). “Perfectly complementary” means that all the contiguous residues of a nucleic acid sequence will hydrogen bond with the same number of contiguous residues in a second nucleic acid sequence. “Substantially complementary” as used herein refers to a degree of complementarity that is at least 60%, 65%, 70%, 75%, 80%, 85%, 90%, 95%, 97%, 98%, 99%, or 100% over a region of 8, 9, 10, 11, 12, 13, 14, 15, 16, 17, 18, 19, 20, 21, 22, 23, 24, 25, 30, 35, 40, 45, 50, or more nucleotides, or refers to two nucleic acids that hybridize under stringent conditions. As used herein, “stringent conditions” for hybridization refer to conditions under which a nucleic acid having complementarity to a target sequence predominantly hybridizes with the target sequence, and substantially does not hybridize to non-target sequences. Stringent conditions are generally sequence-dependent, and vary depending on a number of factors. In general, the longer the sequence, the higher the temperature at which the sequence specifically hybridizes to its target sequence. Non-limiting examples of stringent conditions are described in detail in Tijssen (1993), Laboratory Techniques In Biochemistry And Molecular Biology-Hybridization With Nucleic Acid Probes Part I, Second Chapter “Overview of principles of hybridization and the strategy of nucleic acid probe assay”, Elsevier, N.Y. Where reference is made to a polynucleotide sequence, then complementary or partially complementary sequences are also envisaged. These are preferably capable of hybridizing to the reference sequence under highly stringent conditions. Generally, in order to maximize the hybridization rate, relatively low-stringency hybridization conditions are selected: about 20 to 25° C. lower than the thermal melting point (Tₘ). The Tₘ is the temperature at which 50% of specific target sequence hybridizes to a perfectly complementary probe in solution at a defined ionic strength and pH. Generally, in order to require at least about 85% nucleotide complementarity of hybridized sequences, highly stringent washing conditions are selected to be about 5 to 15° C. lower than the

[0716] In order to require at least about 70% nucleotide complementarity of hybridized sequences, moderately-stringent washing conditions are selected to be about 15 to 30° C. lower than the Tₘ. Highly permissive (very low stringency) washing conditions may be as low as 50° C. below the Tₘ, allowing a high level of mis-matching between hybridized sequences. Those skilled in the art will recognize that other physical and chemical parameters in the hybridization and wash stages can also be altered to affect the outcome of a detectable hybridization signal from a specific level of homology between target and probe sequences. Preferred highly stringent conditions comprise incubation in 50% formamide, 5×SSC, and 1% SDS at 42° C., or incubation in 5×SSC and 1?/o SDS at 65° C., with wash in 0.2×SSC and 0.1% SDS at 65° C. “Hybridization” refers to a reaction in which one or more polynucleotides react to form a complex that is stabilized via hydrogen bonding between the bases of the nucleotide residues. The hydrogen bonding may occur by Watson Crick base pairing, Hoogstein binding, or in any other sequence specific manner. The complex may comprise two strands forming a duplex structure, three or more strands forming a multi stranded complex, a single self-hybridizing strand, or any combination of these. A hybridization reaction may constitute a step in a more extensive process, such as the initiation of PCR, or the cleavage of a polynucleotide by an enzyme. A sequence capable of hybridizing with a given sequence is referred to as the “complement” of the given sequence. As used herein, the term “genomic locus” or “locus” (plural loci) is the specific location of a gene or DNA sequence on a chromosome. A “gene” refers to stretches of DNA or RNA that encode a polypeptide or an RNA chain that has functional role to play in an organism and hence is the molecular unit of heredity in living organisms. For the purpose of this invention it may be considered that genes include regions which regulate the production of the gene product, whether or not such regulatory sequences are adjacent to coding and/or transcribed sequences. Accordingly, a gene includes, but is not necessarily limited to, promoter sequences, terminators, translational regulatory sequences such as ribosome binding sites and internal ribosome entry sites, enhancers, silencers, insulators, boundary elements, replication origins, matrix attachment sites and locus control regions. As used herein, “expression of a genomic locus” or “gene expression” is the process by which information from a gene is used in the synthesis of a functional gene product. The products of gene expression are often proteins, but in non-protein coding genes such as rRNA genes or tRNA genes, the product is functional RNA. The process of gene expression is used by all known life—eukaryotes (including multicellular organisms), prokaryotes (bacteria and archaea) and viruses to generate functional products to survive. As used herein “expression” of a gene or nucleic acid encompasses not only cellular gene expression, but also the transcription and translation of nucleic acid(s) in cloning systems and in any other context. As used herein, “expression” also refers to the process by which a polynucleotide is transcribed from a DNA template (such as into and mRNA or other RNA transcript) and/or the process by which a transcribed mRNA is subsequently translated into peptides, polypeptides, or proteins. Transcripts and encoded polypeptides may be collectively referred to as “gene product.” if the polynucleotide is derived from genomic DNA, expression may include splicing of the mRNA in a eukaryotic cell. The terms “polypeptide”, “peptide” and “protein” are used interchangeably herein to refer to polymers of amino acids of any length. The polymer may be linear or branched, it may comprise modified amino acids, and it may be interrupted by non-amino acids. The terms also encompass an amino acid polymer that has been modified; for example, disulfide bond formation, glycosylation, lipidation, acetylation, phosphorylation, or any other manipulation, such as conjugation with a labeling component. As used herein the term “amino acid” includes natural and/or unnatural or synthetic amino acids, including glycine and both the D or L optical isomers, and amino acid analogs and peptidomimetics. As used herein, the term “domain” or “protein domain” refers to a part of a protein sequence that may exist and function independently of the rest of the protein chain. As described in aspects of the invention, sequence identity is related to sequence homology. Homology comparisons may be conducted by eye, or more usually, with the aid of readily available sequence comparison programs. These commercially available computer programs may calculate percent (%) homology between two or more sequences and may also calculate the sequence identity shared by two or more amino acid or nucleic acid sequences.

[0717] In aspects of the invention the term “guide RNA”, refers to the polynucleotide sequence comprising one or more of a putative or identified tracr sequence and a putative or identified crRNA sequence or guide sequence. In particular embodiments, the “guide RNA” comprises a putative or identified crRNA sequence or guide sequence. In further embodiments, the guide RNA does not comprise a putative or identified tracr sequence.

[0718] As used herein the term “wild type” is a term of the art understood by skilled persons and means the typical form of an organism, strain, gene or characteristic as it occurs in nature as distinguished from mutant or variant forms. A “wild type” can be a base line.

[0719] As used herein the term “variant” should be taken to mean the exhibition of qualities that have a pattern that deviates from what occurs in nature.

[0720] The terms “non-naturally occurring” or “engineered” are used interchangeably and indicate the involvement of the hand of man. The terms, when referring to nucleic acid molecules or polypeptides mean that the nucleic acid molecule or the polypeptide is at least substantially free from at least one other component with which they are naturally associated in nature and as found in nature. In all aspects and embodiments, whether they include these terms or not, it will be understood that, preferably, the may be optional and thus preferably included or not preferably not included. Furthermore, the terms “non-naturally occurring” and “engineered” may be used interchangeably and so can therefore be used alone or in combination and one or other may replace mention of both together. In particular, “engineered” is preferred in place of “non-naturally occurring” or “non-naturally occurring and/or engineered”.

[0721] Sequence homologies may be generated by any of a number of computer programs known in the art, for example BLAST or FASTA, etc. A suitable computer program for carrying out such an alignment is the GCG Wisconsin Bestfit package (University of Wisconsin, U.S.A; Devereux et al., 1984, Nucleic Acids Research 12:387). Examples of other software than may perform sequence comparisons include, but are not limited to, the BLAST package (see Ausubel et al., 1999 ibid—Chapter 18), FASTA (Atschul et al., 1990, J. Mol. Biol., 403-410) and the GENEWORKS suite of comparison tools. Both BLAST and FASTA are available for offline and online searching (see Ausubel et al., 1999 ibid, pages 7-58 to 7-60). However it is preferred to use the GCG Bestfit program. Percentage (%) sequence homology may be calculated over contiguous sequences, i.e., one sequence is aligned with the other sequence and each amino acid or nucleotide in one sequence is directly compared with the corresponding amino acid or nucleotide in the other sequence, one residue at a time. This is called an “ungapped” alignment. Typically, such ungapped alignments are performed only over a relatively short number of residues. Although this is a very simple and consistent method, it fails to take into consideration that, for example, in an otherwise identical pair of sequences, one insertion or deletion may cause the following amino acid residues to be put out of alignment, thus potentially resulting in a large reduction in % homology when a global alignment is performed. Consequently, most sequence comparison methods are designed to produce optimal alignments that take into consideration possible insertions and deletions without unduly penalizing the overall homology or identity score. This is achieved by inserting “gaps” in the sequence alignment to try to maximize local homology or identity. However, these more complex methods assign “gap penalties” to each gap that occurs in the alignment so that, for the same number of identical amino acids, a sequence alignment with as few gaps as possible—reflecting higher relatedness between the two compared sequences—may achieve a higher score than one with many gaps. “Affinity gap costs” are typically used that charge a relatively high cost for the existence of a gap and a smaller penalty for each subsequent residue in the gap. This is the most commonly used gap scoring system. High gap penalties may, of course, produce optimized alignments with fewer gaps. Most alignment programs allow the gap penalties to be modified. However, it is preferred to use the default values when using such software for sequence comparisons. For example, when using the GCG Wisconsin Bestfit package the default gap penalty for amino acid sequences is −12. for a gap and −4 for each extension. Calculation of maximum % homology therefore first requires the production of an optimal alignment, taking into consideration gap penalties. A suitable computer program for carrying out such an alignment is the GCG Wisconsin Bestfit package (Devereux et 1984 Nuc. Acids Research 12 p 387). Examples of other software than may perform sequence comparisons include, but are not limited to, the BLAST package (see Ausubel et al., 1999 Short Protocols in Molecular Biology, 4^{th} Ed.—Chapter 18), FASTA (Altschul et al., 1990 J. Mol. Biol. 403-410) and the GENEWORKS suite of comparison tools. Both BLAST and FASTA are available for offline and online searching (see Ausubel et al., 1999, Short Protocols in Molecular Biology, pages 7-58 to 7-60). However, for some applications, it is preferred to use the GCG Bestfit program. A new tool, called BLAST 2 Sequences is also available for comparing protein and nucleotide sequences (see FEMS Microbiol Lett. 1999 174(2): 247-50; FEMS Microbiol Lett. 1999 177(1): 187-8 and the website of the National Center for Biotechnology information at the website of the National Institutes for Health). Although the final % homology may be measured in terms of identity, the alignment process itself is typically not based on an all-or-nothing pair comparison. Instead, a scaled similarity score matrix is generally used that assigns scores to each pair-wise comparison based on chemical similarity or evolutionary distance. An example of such a matrix commonly used is the BLOSUM62 matrix—the default matrix for the BLAST suite of programs. GCG Wisconsin programs generally use either the public default values or a custom symbol comparison table, if supplied (see user manual for further details). For some applications, it is preferred to use the public default values for the GCG package, or in the case of other software, the default matrix, such as BLOSUM62. Alternatively, percentage homologies may be calculated using the multiple alignment feature in DNASIS™ (Hitachi Software), based on an algorithm, analogous to CLUSTAL (Higgins D G & Sharp P M (1988), Gene 73(1), 237-244). Once the software has produced an optimal alignment, it is possible to calculate % homology, preferably % sequence identity. The software typically does this as part of the sequence comparison and generates a numerical result. The sequences may also have deletions, insertions or substitutions of amino acid residues which produce a silent change and result in a functionally equivalent substance. Deliberate amino acid substitutions may be made on the basis of similarity in amino acid properties (such as polarity, charge, solubility, hydrophobicity, hydrophilicity, and/or the amphipathic nature of the residues) and it is therefore useful to group amino acids together in functional groups. Amino acids may be grouped together based on the properties of their side chains alone. However, it is more useful to include mutation data as well. The sets of amino acids thus derived are likely to be conserved for structural reasons. These sets may be described in the form of a Venn diagram (Livingstone C. D. and Barton G. J. (1993) “Protein sequence alignments: a strategy for the hierarchical analysis of residue conservation” Comput. Appl. Biosci. 9: 745-756) (Taylor W. R. (1986) “The classification of amino acid conservation” J. Theor. Biol. 119; 205-218). Conservative substitutions may be made, for example according to the table below which describes a generally accepted Venn diagram grouping of amino acids.

| Set | | Sub-set | |
|---|---|---|---|
| Hydrophobic | FWYHKMILVAGC | Aromatic | FWYH |
| | | Aliphatic | ILV |
| Polar | WYHKREDCSTNQ | Charged | HKRED |
| | | Positively charged | HKR |
| | | Negatively charged | ED |
| Small | VCAGSPTND | Tiny | AGS |

[0722] The terms “subject,” “individual,” and “patient” are used interchangeably herein to refer to a vertebrate, preferably a mammal, more preferably a human. Mammals include, but are not limited to, murines, simians, humans, farm animals, sport animals, and pets. Tissues, cells and their progeny of a biological entity obtained in vivo or cultured in vitro are also encompassed.

[0723] The terms “therapeutic agent”, “therapeutic capable agent” or “treatment agent” are used interchangeably and refer to a molecule or compound that confers some beneficial effect upon administration to a subject. The beneficial effect includes enablement of diagnostic determinations; amelioration of a disease, symptom, disorder, or pathological condition; reducing or preventing the onset of a disease, symptom, disorder or condition; and generally counteracting a disease, symptom, disorder or pathological condition.

[0724] As used herein, “treatment” or “treating,” or “palliating” or “ameliorating” are used interchangeably. These terms refer to an approach for obtaining beneficial or desired results including but not limited to a therapeutic benefit and/or a prophylactic benefit. By therapeutic benefit is meant any therapeutically relevant improvement in or effect on one or more diseases, conditions, or symptoms under treatment. For prophylactic benefit, the compositions may be administered to a subject at risk of developing a particular disease, condition, or symptom, or to a subject reporting one or more of the physiological symptoms of a disease, even though the disease, condition, or symptom may not have yet been manifested.

[0725] The term “effective amount” or “therapeutically effective amount” refers to the amount of an agent that is sufficient to effect beneficial or desired results. The therapeutically effective amount may vary depending upon one or more of: the subject and disease condition being treated, the weight and age of the subject, the severity of the disease condition, the manner of administration and the like, which can readily be determined by one of ordinary skill in the art. The term also applies to a dose that will provide an image for detection by any one of the imaging methods described herein. The specific dose may vary depending on one or more of: the particular agent chosen, the dosing regimen to be followed, whether it is administered in combination with other compounds, timing of administration, the tissue to be imaged, and the physical delivery system in which it is carried.

[0726] The practice of the present invention employs, unless otherwise indicated, conventional techniques of immunology, biochemistry, chemistry, molecular biology, microbiology, cell biology, genomics and recombinant DNA, which are within the skill of the art. See Sambrook, Fritsch and Maniatis, MOLECULAR CLONING: A LABORATORY MANUAL_{;} 2nd edition (1989); CURRENT PROTOCOLS IN MOLECULAR BIOLOGY (F. M. Ausubel, et al. eds., (1987)); the series METHODS IN ENZYMOLOGY (Academic Press, Inc.): PCR 2: A PRACTICAL APPROACH (M. J. MacPherson, B. D. Hames and G. R. Taylor eds. (1995)), Harlow and Lane, eds. (1988) ANTIBODIES, A LABORATORY MANUAL, and ANIMAL CELL CULTURE (RI. Freshney, ed. (1987)).

[0727] Several aspects of the invention relate to vector systems comprising one or more vectors, or vectors as such. Vectors can be designed for expression of CRISPR transcripts (e.g. nucleic acid transcripts, proteins, or enzymes) in prokaryotic or eukaryotic cells. For example, CRISPR transcripts can be expressed in bacterial cells such as Echerichia coli, insect cells (using baculovirus expression vectors), yeast cells, or mammalian cells. Suitable host cells are discussed further in Goeddel, GENE EXPRESSION TECHNOLOGY: METHODS IN ENZYMOLOGY 185, Academic Press, San Diego, Calif. (1990). Alternatively, the recombinant expression vector can be transcribed and translated in vitro, for example using T7 promoter regulatory sequences and T7 polymerase.

[0728] Embodiments of the invention include sequences (both polynucleotide or polypeptide) which may comprise homologous substitution (substitution and replacement are both used herein to mean the interchange of an existing amino acid residue or nucleotide, with an alternative residue or nucleotide) that may occur i.e., like-for-like substitution in the case of amino acids such as basic for basic, acidic for acidic, polar for polar, etc. Non-homologous substitution may also occur i.e., from one class of residue to another or alternatively involving the inclusion of unnatural amino acids such as ornithine (hereinafter referred to as Z), diaminobutyric acid ornithine (hereinafter referred to as B), norleucine ornithine (hereinafter referred to as O), pyriylaianine, thienylalanine, naphthylaianine and phenylglycine. Variant amino acid sequences may include suitable spacer groups that may be inserted between any two amino acid residues of the sequence including alkyl groups such as methyl, ethyl or propyl groups in addition to amino acid spacers such as glycine or β-alanine residues. A further form of variation, which involves the presence of one or more amino acid residues in peptoid form, may be well understood by those skilled in the art. For the avoidance of doubt, “the peptoid form” is used to refer to variant amino acid residues wherein the α-carbon substituent group is on the residue's nitrogen atom rather than the α-carbon. Processes for preparing peptides in the peptoid form are known in the art, for example Simon R J et al., PNAS (1992) 89(20), 9367-9371 and Harwell D C, Trends Biotechnol. (1995) 13(4), 132-134.

[0729] Homology modelling: Corresponding residues in other C2c2 orthologs can be identified by the methods of Zhang et al., 2012 (Nature; 490(7421): 556-60) and Chen et al., 2015 (PLoS Comput Biol; 11(5): e1004248)—a computational protein-protein interaction (PPI) method to predict interactions mediated by domain-motif interfaces. PrePPI (Predicting PPI), a structure based PPI prediction method, combines structural evidence with non-structural evidence using a Bayesian statistical framework. The method involves taking a pair a query proteins and using structural alignment to identify structural representatives that correspond to either their experimentally determined structures or homology models. Structural alignment is further used to identify both close and remote structural neighbors by considering global and local geometric relationships. Whenever two neighbors of the structural representatives form a complex reported in the Protein Data Bank, this defines a template for modelling the interaction between the two query proteins. Models of the complex are created by superimposing the representative structures on their corresponding structural neighbor in the template. This approach is further described in Dey et al., 2013 (Prot Sci; 22: 359-66).

[0730] For purpose of this invention, amplification means any method employing a primer and a polymerase capable of replicating a target sequence with reasonable fidelity, Amplification may be carried out by natural or recombinant DNA polymerases such as TaqGold™, T7 DNA polymerase, Klenow fragment of E.coli DNA polymerase, and reverse transcriptase. A preferred amplification method is PCR

[0731] In certain aspects the invention involves vectors. A used herein, a “vector” is a tool that allows or facilitates the transfer of an entity from one environment to another. It is a replicon, such as a plasmid, phage, or cosmid, into which another DNA segment may be inserted so as to bring about the replication of the inserted segment, Generally, a vector is capable of replication when associated with the proper control elements. In general, the term “vector” refers to a nucleic acid molecule capable of transporting another nucleic acid to which it has been linked. Vectors include, but are not limited to, nucleic acid molecules that are single-stranded, double-stranded, or partially double-stranded; nucleic acid molecules that comprise one or more free ends, no free ends (e.g., circular); nucleic acid molecules that comprise DNA, RNA, or both; and other varieties of polynucleotides known in the art. One type of vector is a “plasmid,” which refers to a circular double stranded DNA loop into which additional DNA segments can be inserted, such as by standard molecular cloning techniques. Another type of vector is a viral vector, wherein virally-derived DNA or RNA sequences are present in the vector for packaging into a virus (e.g., retroviruses, replication defective retroviruses, adenoviruses, replication defective adenoviruses, and adeno-associated viruses (AAVs)). Viral vectors also include polynucleotides carried by a virus for transfection into a host cell. Certain vectors are capable of autonomous replication in a host cell into which they are introduced (e.g., bacterial vectors having a bacterial origin of replication and episomal mammalian vectors). Other vectors (es,, non-episomal mammalian vectors) are integrated into the genome of a host cell upon introduction into the host cell, and thereby are replicated along with the host genome. Moreover, certain vectors are capable of directing the expression of genes to which they are operatively-linked. Such vectors are referred to herein as “expression vectors.” Common expression vectors of utility in recombinant DNA techniques are often in the form of plasmids.

[0732] Recombinant expression vectors can comprise a nucleic acid of the invention in a form suitable for expression of the nucleic acid in a host cell, which means that the recombinant expression vectors include one or more regulatory elements, which may be selected on the basis of the host cells to be used for expression, that is operatively-linked to the nucleic acid sequence to be expressed. Within a recombinant expression vector, “operably linked” is intended to mean that the nucleotide sequence of interest is linked to the regulatory element(s) in a manner that allows for expression of the nucleotide sequence (e.g., in an in vitro transcription/translation system or in a host cell when the vector is introduced into the host cell). With regards to recombination and cloning methods, mention is made of U.S. patent application Ser. No. 10/815,730, published Sep. 2, 2004 as US 2004-0171156 A1, the contents of which are herein incorporated by reference in their entirety.

[0733] Aspects of the invention relate to bicistronic vectors for guide RNA and wild type, modified or mutated CRISPR effector proteins/enzymes (e.g. C2c2). Bicistronic expression vectors guide RNA and wild type, modified or mutated CRISPR effector proteins/enzymes (e.g. C2c2) are preferred. In general and particularly in this embodiment and wild type, modified or mutated CRISPR effector proteins/enzymes (e.g. C2c2) is preferably driven by the CBh promoter. The RNA may preferably be driven by a Pot ill promoter, such as a U6 promoter. Ideally the two are combined.

[0734] In some embodiments, a loop in the guide RNA is provided. This may be a stem loop or a tetra loop. The loop is preferably GAAA, but it is not limited to this sequence or indeed to being only 4 bp in length. Indeed, preferred loop forming sequences for use in hairpin structures are four nucleotides in length, and most preferably have the sequence GAAA. However, longer or shorter loop sequences may be used, as may alternative sequences. The sequences preferably include a nucleotide triplet (for example, AAA), and an additional nucleotide (for example C or G). Examples of loop forming sequences include CAAA and AAAG.

[0735] In practicing any of the methods disclosed herein, a suitable vector can be introduced to a cell or an embryo via one or more methods known in the art, including without limitation, microinjection, electroporation, sonoporation, biolistics, calcium phosphate-mediated transfection, cationic transfection, liposome transfection, dendrimer transfection, heat shock transfection, nucleofection transfecti on, magnetofection, lipofection, impalefection, optical transfection, proprietary agent-enhanced uptake of nucleic acids, and delivery via liposomes, immunoliposomes, virosomes, or artificial virions. In some methods, the vector is introduced into an embryo by microinjection. The vector or vectors may be microinjected into the nucleus or the cytoplasm of the embryo. In some methods, the vector or vectors may be introduced into a cell by nucleofection.

[0736] The term “regulatory element” is intended to include promoters, enhancers, internal ribosomal entry sites (IRES), and other expression control elements (e.g., transcription termination signals, such as polyadenylation signals and poly-U sequences). Such regulatory elements are described, for example, in Goeddel, GENE EXPRESSION TECHNOLOGY: METHODS IN ENZYMOLOGY 185, Academic Press, San Diego, Calif. (1990). Regulatory elements include those that direct constitutive expression of a nucleotide sequence in many types of host cell and those that direct expression of the nucleotide sequence only in certain host cells (e.g., tissue-specific regulatory sequences). A tissue-specific promoter may direct expression primarily in a desired tissue of interest, such as muscle, neuron, bone, skin, blood, specific organs (e.g., liver, pancreas), or particular cell types (e.g., lymphocytes). Regulatory elements may also direct expression in a temporal-dependent manner, such as in a cell-cycle dependent or developmental stage-dependent manner, which may or may not also be tissue or cell-type specific. In some embodiments, a vector comprises one or more pol III promoter (e.g., 1, 2, 3, 4, 5, or more pol III promoters), one or more pol II promoters (e.g., 1, 2, 3, 4, 5, or more pol II promoters), one or more pol I promoters (e.g., 1, 2, 3, 4, 5, or more pol 1 promoters), or combinations thereof. Examples of pol III promoters include, but are not limited to, U6 and H1 promoters. Examples of pol II promoters include, but are not limited to, the retroviral Rous sarcoma virus (RSV) LTR promoter (optionally with the RSV enhancer), the cytomegalovirus (CMV) promoter (optionally with the CMV enhancer) [see, e.g., Boshart et al, Cell, 41:521-530 (1985)], the SV40 promoter, the dihydrofolate reductase promoter, the β-actin promoter, the phosphoglycerol kinase (PGK) promoter, and the EF1α promoter. Also encompassed by the term “regulatory element” are enhancer elements, such as WPRE; CMV enhancers; the R-U5′ segment in LTR of HTLV-I (Mol. Cell. Biol., Vol. 8(1), p. 466-472, 1988); SV40 enhancer; and the intron sequence between exons 2. and 3 of rabbit β-globin (Proc. Natl. Acad. Sci. USA., Vol. 78(3), p. 1527-31, 1981). It will be appreciated by those skilled in the art that the design of the expression vector can depend on such factors as the choice of the host cell to be transformed, the level of expression desired, etc. A vector can be introduced into host cells to thereby produce transcripts, proteins, or peptides, including fusion proteins or peptides, encoded by nucleic acids as described herein (e.g., clustered regularly interspersed short palindromic repeats (CRISPR) transcripts, proteins, enzymes, mutant forms thereof, fusion proteins thereof, etc.). With regards to regulatory sequences, mention is made of U.S. patent application Ser. No. 10/491,026, the contents of which are incorporated by reference herein in their entirety. With regards to promoters, mention is made of PCT publication WO 2011/028929 and U.S. application Ser. No. 12/511,940, the contents of which are incorporated by reference herein in their entirety.

[0737] Vectors can be designed for expression of CRISPR transcripts (e.g., nucleic acid transcripts, proteins, or enzymes) in prokaryotic or eukaryotic cells. For example, CRISPR transcripts can be expressed in bacterial cells such as Escherichia coli, insect cells (using baculovirus expression vectors), yeast cells, or mammalian cells. Suitable host cells are discussed further in Goeddel, GENE EXPRESSION TECHNOLOGY: METHODS IN ENZYMOLOGY 185, Academic Press, San Diego, Calif. (1990). Alternatively, the recombinant expression vector can be transcribed and translated in vitro, for example using T7 promoter regulatory sequences and T7 polymerase.

[0738] Vectors may be introduced and propagated in a prokaryote or prokaryotic cell. In some embodiments, a prokaryote is used to amplify copies of a vector to be introduced into a eukaryotic cell or as an intermediate vector in the production of a vector to be introduced into a eukaryotic cell (e.g., amplifying a plasmid as part of a viral vector packaging system). In some embodiments, a prokaryote is used to amplify copies of a vector and express one or more nucleic acids, such as to provide a source of one or more proteins for delivery to a host cell or host organism. Expression of proteins in prokaryotes is most often carried out in Escherichia coli with vectors containing constitutive or inducible promoters directing the expression of either fusion or non-fusion proteins. Fusion vectors add a number of amino acids to a protein encoded therein, such as to the amino terminus of the recombinant protein. Such fusion vectors may serve one or more purposes, such as: (i) to increase expression of recombinant protein; (ii) to increase the solubility of the recombinant protein; and (iii) to aid in the purification of the recombinant protein by acting as a ligand in affinity purification. Often, in fusion expression vectors, a proteolytic cleavage site is introduced at the junction of the fusion moiety and the recombinant protein to enable separation of the recombinant protein from the fusion moiety subsequent to purification of the fusion protein. Such enzymes, and their cognate recognition sequences, include Factor Xa, thrombin and enterokinase. Example fusion expression vectors include pGEX (Pharmacia Biotech Inc; Smith and Johnson, 1988. Gene 67: 31-40), pMAL (New England Biolabs, Beverly, Mass.) and pRIT5 (Pharmacia, Piscataway, N.J.) that fuse glutathione S-transferase (GST), maltose E binding protein, or protein A, respectively, to the target recombinant protein.

[0739] Examples of suitable inducible non-fusion E. coli expression vectors include pTrc (Amrann et al, (1988) Gene 69:301-315) and pET 11d (Studier et al., GENE EXPRESSION TECHNOLOGY: MFTHODS IN ENZYMOLOGY 185, Academic Press, San Diego, Calif. (1990) 60-89).

[0740] In some embodiments, a vector is a yeast expression vector. Examples of vectors for expression in yeast Saccharomyces cerivisae include pYepSecl (Baldari, et al., 1987. EMBO J. 6: 229-234), pMFa (Kuijan and Herskowitz, 1982. Cell 30: 933-943), pJRY88 (Schultz et al., 1987, Gene 54: 113-123), pYES2 (Invitrogen Corporation, San Diego, Calif.), and picZ (InVitrogen Corp, San Diego, Calif.).

[0741] In some embodiments, a vector drives protein expression in insect cells using baculovirus expression vectors. Baculovinis vectors available for expression of proteins in cultured insect cells (e.g., SF9 cells) include the pAc series (Smith, et al., 1983. Mol. Cell. Biol. 3: 2156-2165) and the pVL series (Lucklow and Summers, 1989. Virology 170: 31-39).

[0742] In some embodiments, a vector is capable of driving expression of one or more sequences in mammalian cells using a mammalian expression vector. Examples of mammalian expression vectors include pCDM8 (Seed, 1987. Nature 329: 840) and pMT2PC (Kaufman, et al., 1987. EMBO J. 6: 187-195). When used in mammalian cells, the expression vector's control functions are typically provided by one or more regulatory elements. For example, commonly used promoters are derived from polyoma, adenovirus 2, cytomegalovirus, simian virus 40, and. others disclosed herein and known in the art. For other suitable expression systems for both prokaryotic and eukaryotic cells see, e.g., Chapters 16 and 17 of Sambrook, et al., MOLECULAR CLONING: A LABORATORY MANUAL. 2nd ed., Cold Spring Harbor Laboratory, Cold Spring Harbor Laboratory Press, Cold Spring Harbor, N.Y., 1989.

[0743] In some embodiments, the recombinant mammalian expression vector is capable of directing expression of the nucleic acid preferentially in a particular cell type (e.g., tissue-specific regulatory elements are used to express the nucleic acid). Tissue-specific regulatory elements are known in the art. Non-limiting examples of suitable tissue-specific promoters include the albumin promoter (liver-specific; Pinkert, et al., 1987. Genes Dev. 1: 268-277), lymphoid-specific promoters (Calame and Eaton, 1988. Adv. Immunol. 43: 235-275), in particular promoters of T cell receptors (Winoto and Baltimore, 1989. EMBO J. 8: 729-733) and immunoglobulins (Baneiji, et al., 1983. Cell 33: 729-740; Queen and Baltimore, 1983. Cell 33: 741-748), neuron-specific promoters (e.g., the neurofilament promoter; Byrne and Ruddle, 1989. Proc. Natl. Acad. Sci. USA 86: 5473-5477), pancreas-specific promoters (Edlund, et al., 1985. Science 230: 912-916), and mammary gland-specific promoters (e.g., milk whey promoter; U.S. Pat. No. 4,873,316 and European Application Publication No. 264,166). Developmentally-regulated promoters are also encompassed, e.g., the murine hoe promoters (Kessel and Gruss, 1990. Science 249: 374-379) and the a-fetoprotein promoter (Campes and Tilghman, 1989. Genes Dev. 3: 537-546). With regards to these prokaryotic and eukaryotic vectors, mention is made of U.S. Pat. No. 6,750,059, the contents of which are incorporated by reference herein in their entirety. Other embodiments of the invention may relate to the use of viral vectors, with regards to which mention is made of U.S. patent application Ser. No. 13/092,085, the contents of which are incorporated by reference herein in their entirety. Tissue-specific regulatory elements are known in the art and in this regard, mention is made of U.S. Pat. No. 7,776,321, the contents of which are incorporated by reference herein in their entirety.

[0744] In some embodiments, a regulatory element is operably linked to one or more elements of a CRISPR system so as to drive expression of the one or more elements of the CRISPR system. In general, CRISPRs (Clustered Regularly Interspaced Short Palindromic Repeats), also known as SPIDRs (SPacer Interspersed Direct Repeats), constitute a family of DNA loci that are usually specific to a particular bacterial species. The CRISPR locus comprises a distinct class of interspersed short sequence repeats (SSRs) that were recognized in E. coli (Ishino et al., J. Bacteria, 169:5429-5433 [1987]; and Nakata et al., J. Bacteriol., 171:3553-3556 [1989]), and associated genes. Similar interspersed SSRs have been identified in Haloferax mediterranei, Streptococcus pyogenes, Anabaena, and Mycobacterium tuberculosis (See, Groenen et al., Mol. Microbiol., 10:1057-1065 [1993]; Hoe et al., Emerg. Infect. Dis., 5:254-263 [1999]; Masepohl et al., Biochim. Biophys. Acta 1307:26-30 [1996]; and Mojica et al., Mol. Microbiol., 17:85-93 [1995]), The CRISPR loci typically differ from other SSRs by the structure of the repeats, which have been termed short regularly spaced repeats (SRSRs) (Janssen et al., OMICS J. Integ. Biol., 6:23-33 [2002]; and Mojica et al., Mol. Microbiol., 36:244-246 [2000]). in general, the repeats are short elements that occur in clusters that are regularly spaced by unique intervening sequences with a substantially constant length (Mojica et al., [2000], supra). Although the repeat sequences are highly conserved between strains, the number of interspersed repeats and the sequences of the spacer regions typically differ from strain to strain (van Embden et al., J. Bacteriol., 182:2393-2401 [2000]). CRISPR loci have been identified in more than 40 prokaryotes (See e.g., Jansen et al., Mol. Microbiol., 43:1565-1575 [2002]; and Mojica et al., [2005]) including, but not limited to Aeropyrum, Pyrobaculum, Sulfolobus, Archaeoglobus, Halocarcula, Methanobacterium, Methanococcus, Methanosarcina, Methanopyrus, Pyrococcus, Picrophilus, Thermoplasma, Corynebacterium, Mycobacterium, Streptomyces, Aquifex, Porphyromonas, Chlorobium, Thermus, Bacillus, Listeria, Staphylococcus, Clostridium, Thermoanaerobacter, Mycoplasma, Fusobacterium, Azarcus, Chromobacterium, Neisseria, Nitrosomonas, Desulfovibrio, Geobacter, Myxococcus, Campylobacter, Wolinella, Acinetobacter, Erwinia, Escherichia, Legionella, Methylococcus, Pasteurella, Photobacterium, Salmonella, Xanthomonas, Yersinia, Treponema, and Thermotoga.

[0745] In general, “nucleic acid-targeting system” as used in the present application refers collectively to transcripts and other elements involved in the expression of or directing the activity of nucleic acid-targeting CRISPR-associated (“Cas”) genes (also referred to herein as an effector protein), including sequences encoding a nucleic acid-targeting Cas (effector) protein and a guide RNA (comprising crRNA sequence and a trans-activating CRISPR/Cas system RNA (tracrRNA) sequence), or other sequences and transcripts from a nucleic acid-targeting CRISPR locus. In some embodiments, one or more elements of a nucleic acid-targeting system are derived from a Type NT/Type VI nucleic acid-targeting CRISPR system. In some embodiments, one or more elements of a nucleic acid-targeting system is derived from a particular organism comprising an endogenous nucleic acid-targeting CRISPR system. In general, a nucleic acid-targeting system is characterized by elements that promote the formation of a nucleic acid-targeting complex at the site of a target sequence. in the context of formation of a nucleic acid-targeting complex, “target sequence” refers to a sequence to which a guide sequence is designed to have complementarity, where hybridization between a target sequence and a guide RNA promotes the formation of a DNA or RNA-targeting complex. Full complementarity is not necessarily required, provided there is sufficient complementarity to cause hybridization and promote formation of a nucleic acid-targeting complex. A target sequence may comprise RNA polynucleotides. In some embodiments, a target sequence is located in the nucleus or cytoplasm of a cell. In some embodiments, the target sequence may be within an organelle of a eukaryotic cell, for example, mitochondrion or chloroplast. A sequence or template that may be used for recombination into the targeted locus comprising the target sequences is referred to as an “editing template” or “editing RNA” or “editing sequence”. In aspects of the invention, an exogenous template RNA may be referred to as an editing template. In an aspect of the invention the recombination is homologous recombination.

[0746] Typically, in the context of an endogenous nucleic acid-targeting system, formation of a nucleic acid-targeting complex (comprising a guide RNA hybridized to a target sequence and complexed with one or more nucleic acid-targeting effector proteins) results in cleavage of one or both RNA strands in or near (e.g. within 1, 2, 3, 4, 5, 6, 7, 8, 9, 10, 20, 50, or more base pairs from) the target sequence. In some embodiments, one or more vectors driving expression of one or more elements of a nucleic acid-targeting system are introduced into a host cell such that expression of the elements of the nucleic acid-targeting system direct formation of a nucleic acid-targeting complex at one or more target sites. For example, a nucleic acid-targeting effector protein and a guide RNA could each be operably linked to separate regulatory elements on separate vectors. Alternatively, two or more of the elements expressed from the same or different regulatory elements, may be combined in a single vector, with one or more additional vectors providing any components of the nucleic acid-targeting system not included in the first vector, nucleic acid-targeting system elements that are combined in a single vector may be arranged in any suitable orientation, such as one element located 5′ with respect to (“upstream” of) or 3′ with respect to (“downstream” of) a second element. The coding sequence of one element may be located on the same or opposite strand of the coding sequence of a second element, and oriented in the same or opposite direction. In some embodiments, a single promoter drives expression of a transcript encoding a nucleic acid-targeting effector protein and a guide RNA embedded within one or more intron sequences (e.g. each in a different intron, two or more in at least one intron, or all in a single intron). In some embodiments, the nucleic acid-targeting effector protein and guide RNA are operably linked to and expressed from the same promoter.

[0747] In general, a guide sequence is any polynucleotide sequence having sufficient complementarity with a target polynucleotide sequence to hybridize with the target sequence and direct sequence-specific binding of a nucleic acid-targeting complex to the target sequence. in some embodiments, the degree of complementarity between a guide sequence and its corresponding target sequence, when optimally aligned using a suitable alignment algorithm, is about or more than about 50%, 60%, 75%, 80%, 85%, 90%, 95%, 97.5%, 99%, or more. Optimal alignment may be determined with the use of any suitable algorithm for aligning sequences, non-limiting example of which include the Smith-Waterman algorithm, the Needleman-Wunsch algorithm, algorithms based on the Burrows-Wheeler Transform (e.g. the Burrows Wheeler Aligner), ClustalW, Clustal X, BLAT, Novoalign (Novocraft Technologies, ELAND lumina, San Diego, Calif.), SOAP (available at soap.genomics.org.cn), and Maq (available at maq.sourceforge.net). In some embodiments, a guide sequence is about or more than about 5, 10, 11, 12, 13, 14, 15, 16, 17, 18, 19, 20, 21, 23, 24, 25, 26, 27, 28, 29, 30, 35, 40, 45, 50, 75, or more nucleotides in length. In some embodiments, a guide sequence is less than about 75, 50, 45, 40, 35, 30, 25, 20, 15, 12, or fewer nucleotides in length. The ability of a guide sequence to direct sequence-specific binding of a nucleic acid-targeting complex to a target sequence may be assessed by any suitable assay. For example, the components of a nucleic acid-targeting system sufficient to form a nucleic acid-targeting complex, including the guide sequence to be tested, may be provided to a host cell having the corresponding target sequence, such as by transfection with vectors encoding the components of the nucleic acid-targeting CRISPR sequence, followed by an assessment of preferential cleavage within or in the vicinity of the target sequence, such as by Surveyor assay as described herein. Similarly, cleavage of a target polynucleotide sequence (or a sequence in the vicinity thereof) may be evaluated in a test tube by providing the target sequence, components of a nucleic acid-targeting complex, including the guide sequence to be tested and a control guide sequence different from the test guide sequence, and comparing binding or rate of cleavage at or in the vicinity of the target sequence between the test and control guide sequence reactions. Other assays are possible, and will occur to those skilled in the art.

[0748] A guide sequence may be selected to target any target sequence. In some embodiments, the target sequence is a sequence within a gene transcript or mRNA.

[0749] In some embodiments, the target sequence is a sequence within a genome of a cell.

[0750] In some embodiments, a guide sequence is selected to reduce the degree of secondary structure within the guide sequence. Secondary structure may be determined by any suitable polynucleotide folding algorithm. Some programs are based on calculating the minimal Gibbs free energy. An example of one such algorithm is mFold, as described by Zuker and Stiegler (Nucleic Acids Res. 9 (1981), 133-148). Another example folding algorithm is the online webserver RNAfold, developed at Institute for Theoretical Chemistry at the University of Vienna, using the centroid structure prediction algorithm (see e.g. A. R. Gruber et al., 2008, Cell 106(1): 23-24; and P A Carr and G M Church, 2009, Nature Biotechnology 27(12): 1151-62). Further algorithms may be found in U.S. application Serial No. TBA (attorney docket 44790.11.2022; Broad Reference BI-2013/004A); incorporated herein by reference.

[0751] In some embodiments, the nucleic acid-targeting effector protein is part of a fusion protein comprising one or more heterologous protein domains (e.g., about or more than about 1, 2, 3, 4, 5, 6, 7, 8, 9, 10, or more domains in addition to the nucleic acid-targeting effector protein). In some embodiments, the CRISPR effector protein/enzyme is part of a fusion protein comprising one or more heterologous protein domains (e.g. about or more than about 1, 2, 3, 4, 5, 6, 8, 9, 10, or more domains in addition to the CRISPR enzyme). A CRISPR effector protein/enzyme fusion protein may comprise any additional protein sequence, and optionally a linker sequence between any two domains. Examples of protein domains that may be fused to an effector protein include, without limitation, epitope tags, reporter gene sequences, and protein domains having one or more of the following activities: methtlase activity, demethylase activity, transcription activation activity, transcription repression activity, transcription release factor activity, histone modification activity, RNA cleavage activity and nucleic acid binding activity. Non-limiting examples of epitope tags include histidine (His) tags, V5 tags, FLAG tags, influenza hemagglutinin (HA) tags, Myc tags, VSV-G tags, and thioredoxin (Trx) tags. Examples of reporter genes include, but are not limited to, glutathione-S-transferase (GST), horseradish peroxidase (HRP), chloramphenicol acetyltransferase (CAT) beta-galactosidase, beta-glucuronidase, luciferase, green fluorescent protein (GFP), HcRed, DsRed, cyan fluorescent protein (CFP), yellow fluorescent protein (YFP), and autofluorescent proteins including blue fluorescent protein (BFP). A nucleic acid-targeting effector protein may be fused to a gene sequence encoding a protein or a fragment of a protein that bind DNA molecules or bind other cellular molecules, including but not limited to maltose binding protein (MBP) S-tag, Lex A DNA binding domain (DBD) fusions, GAL4 DNA binding domain fusions, and herpes simplex virus (HSV) BP16 protein fusions. Additional domains that may form part of a fusion protein comprising a nucleic acid-targeting effector protein are described in US20110059502, incorporated herein by reference. In some embodiments, a tagged nucleic acid-targeting effector protein is used to identify the location of a target sequence.

[0752] In some embodiments, a CRISPR enzyme may form a component of an inducible system. The inducible nature of the system would allow for spatiotemporal control of gene editing or gene expression using a form of energy. The form of energy may include but is not limited to electromagnetic radiation, sound energy, chemical energy and thermal energy. Examples of inducible system include tetracycline inducible promoters (Tet-On or Tet-Off), small molecule two-hybrid transcription activations systems (FKBP, ABA, etc), or light inducible systems (Phytochrome, LOV domains, or cryptochrome),In one embodiment, the CRISPR enzyme may be a part of a Light Inducible Transcriptional Effector (LITE) to direct changes in transcriptional activity in a sequence-specific manner. The components of a light may include a CRISPR enzyme, a light-responsive cytochrome heterodimer (e.g. from Arabidopsis thaliana), and a transcriptional activation/repression domain. Further examples of inducible DNA binding proteins and methods for their use are provided in U.S. 61/736465 and U.S. 61/721,283 and WO 2014/018423 and U.S. Pat. No. 8,889,418, US8895308, 0520140186919, US2014024 700, US20140273234, US20140335620, WO2014093635, which is hereby incorporated by reference in its entirety.

[0753] In some aspects, the invention provides methods comprising delivering one or more polynucleotides, such as or one or more vectors as described herein, one or more transcripts thereof, and/or one or proteins transcribed therefrom, to a host cell. In some aspects, the invention further provides cells produced by such methods, and organisms (such as animals, plants, or fungi) comprising or produced from such cells. In some embodiments, a nucleic acid-targeting effector protein in combination with (and optionally complexed with) a guide RNA is delivered to a cell. Conventional viral and non-viral based gene transfer methods can be used to introduce nucleic acids in mammalian cells or target tissues. Such methods can be used to administer nucleic acids encoding components of a nucleic acid-targeting system to cells in culture, or in a host organism. Non-viral vector delivery systems include DNA plasmids, RNA (e.g. a transcript of a vector described herein), naked nucleic acid, and nucleic acid complexed with a delivery vehicle, such as a liposome. Viral vector delivery systems include DNA and RNA viruses, which have either episomal or integrated genomes after delivery to the cell. For a review of gene therapy procedures, see Anderson, Science 256:808-813 (1992); Nabel & Feigner, TIBTECH 11:211-217 (1993); Mitani & Caskey, TIBTECII 11:162-166 (1993); Dillon, TIBTECH 11:167-175 (1993); Miller, Nature 357:455-46( )(1992); Van Brunt, Biotechnology 6(10)1149-1154 (1988); Vigne, Restorative Neurology and Neuroscience 8:35-36 (1995); Kremer & Perricaudet, British Medical Bulletin 51(1):31-44 (1995); Haddada et al., in Current Topics in Microbiology and Immunology, Doerfler and Böhm (eds) (1995); and Yu et al., Gene Therapy 1:13-26 (1994).

[0754] Methods of non-viral delivery of nucleic acids include lipofection, nucleofection, microinjection, biolistics, virosomes, liposomes, immunoliposornes, polycation or lipid:nucleic acid conjugates, naked DNA, artificial virions, and agent-enhanced uptake of DNA. Lipofection is described in e.g., U.S. Pat. Nos. 5,049,386, 4,946,787; and 4,897,355) and lipofection reagents are sold commercially (e.g., Transfectam™ and Lipofectin™). Cationic and neutral lipids that are suitable for efficient receptor-recognition lipofection of polynucleotides include those of Felgner, WO 91/17424; WO 91/16024, Delivery can be to cells (e.g. in vitro or ex vivo administration) or target tissues (e.g. in vivo administration).

[0755] The preparation of lipid:nucleic acid complexes, including targeted liposomes such as immunolipid complexes, is well known to one of skill in the art (see, e.g., Crystal, Science 270:404-410 (1995); Blaese et al. Cancer Gene Ther. 2:291-297 (1995); Behr et al., Bioconjugate Chem. 5:382-389 (1994); Remy et al., Bioconjugate Chem, 5:647-654 (1994); Gao et al., Gene Therapy 2:710-722 (1995); Ahmad et al., Cancer Res. 52:4817-4820 (1992); U.S. Pat. Nos. 4,186,183, 4,217,344, 4,235,871, 4,261,975, 4,485,054, 4,501,728, 4,774,085, 4,837,028, and 4,946,787).

[0756] The use of RNA or DNA viral based systems for the delivery of nucleic acids takes advantage of highly evolved processes for targeting a virus to specific cells in the body and trafficking the viral payload to the nucleus. Viral vectors can be administered directly to patients (in vivo) or they can be used to treat cells in vitro, and the modified cells may optionally be administered to patients (ex vivo). Conventional viral based systems could include retroviral, lentivirus, adenoviral, adeno-associated and herpes simplex virus vectors for gene transfer. Integration in the host genome is possible with the retrovirus, lentivirus, and adeno-associated virus gene transfer methods, often resulting in long term expression of the inserted transgene. Additionally, high transduction efficiencies have been observed in many different cell types and target tissues.

[0757] The tropism of a retrovirus can be altered by incorporating foreign envelope proteins, expanding the potential target population of target cells. Lentiviral vectors are retroviral vectors that are able to transduce or infect non-dividing cells and typically produce high viral titers. Selection of a retroviral gene transfer system would therefore depend on the target tissue. Retroviral vectors are comprised of cis-acting long terminal repeats with packaging capacity for up to 6-10 kb of foreign sequence. The minimum cis-acting LTRs are sufficient for replication and packaging of the vectors, which are then used to integrate the therapeutic gene into the target cell to provide permanent transgene expression. Widely used retroviral vectors include those based upon murine leukemia virus (MuLV), gibbon ape leukemia virus (GaLV), Simian Immuno deficiency virus (SIV), human immuno deficiency virus (HIV), and combinations thereof (see, e.g., Buchscher et at, J. Virol. 66:2731-2739 (1992); Johann et al, J. Virol. 66:1635-1640 (1992); Sommnerfelt et al., Virol. 176:58-59 (1990); Wilson et al., J. Virol. 63:2374-2378 (1989); Miller et al., J. Virol 65:2220-2224 (1991); PCT/US94105700),In applications where transient expression is preferred, adenoviral based systems may be used. Adenoviral based vectors are capable of very high transduction efficiency in many cell types and do not require cell division. With such vectors, high titer and levels of expression have been obtained. This vector can be produced in large quantities in a relatively simple system. Adeno-associated virus (“AAV”) vectors may also be used to transduce cells with target nucleic acids, e.g., in the in vitro production of nucleic acids and peptides, and for in vivo and ex vivo gene therapy procedures (see, e.g., West et al., Virology 160:38-47 (1987); U.S. Pat. No. 4,797,368; WO 93/24641; Kotin, Human Gene Therapy 5:793-801 (1994); Muzyczka, J. Clin. Invest. 94:1351 (1994), Construction of recombinant AAV vectors are described in a number of publications, including U.S. Pat. No. 5,173,414; Tratschin et al., Mol. Cell. Biol. 5:3251-3260 (1985); Tratschin, et al., Mol. Cell. Biol. 4:2072-2081 (1984); Hermonat &. Muzyczka, PNAS 81:6466-6470 (1984); and Samulski et al., J. Virol. 63:03822-3828 (1989).

### Models of Genetic and Epigenetic Conditions

[0758] A method of the invention may be used to create a plant, an animal or cell that may be used to model and/or study genetic or epigenetic conditions of interest, such as a through a model of mutations of interest or a disease model. As used herein, “disease” refers to a disease, disorder, or indication in a subject. For example, a method of the invention may be used to create an animal or cell that comprises a modification in one or more nucleic acid sequences associated with a disease, or a plant, animal or cell in which the expression of one or more nucleic acid sequences associated with a disease are altered. Such a nucleic acid sequence may encode a disease associated protein sequence or may be a disease associated control sequence. Accordingly, it is understood that in embodiments of the invention, a plant, subject, patient, organism or cell can be a non-human subject, patient, organism or cell. Thus, the invention provides a plant, animal or cell, produced by the present methods, or a progeny thereof. The progeny may be a clone of the produced plant or animal, or may result from sexual reproduction by crossing with other individuals of the same species to introgress further desirable traits into their offspring. The cell may be in vivo or ex vivo in the cases of multicellular organisms, particularly animals or plants. In the instance where the cell is in cultured, a cell line may be established if appropriate culturing conditions are met and preferably if the cell is suitably adapted for this purpose (for instance a stem cell). Bacterial cell lines produced by the invention are also envisaged. Hence, cell lines are also envisaged.

[0759] In some methods, the disease model can be used to study the effects of mutations on the animal or cell and development and/or progression of the disease using measures commonly used in the study of the disease. Alternatively, such a disease model is useful for studying the effect of a pharmaceutically active compound on the disease.

[0760] In some methods, the disease model can be used to assess the efficacy of a potential gene therapy strategy. That is, a disease-associated gene or polynucleotide can be modified such that the disease development and/or progression is inhibited or reduced. In particular, the method comprises modifying a disease-associated gene or polynucleotide such that an altered protein is produced and, as a result, the animal or cell has an altered response. Accordingly, in some methods, a genetically modified animal may be compared with an animal predisposed to development of the disease such that the effect of the gene therapy event may be assessed.

[0761] In another embodiment, this invention provides a method of developing a biologically active agent that modulates a cell signaling event associated with a disease gene. The method comprises contacting a test compound with a cell comprising one or more vectors that drive expression of one or more of a CRISPR enzyme, and a direct repeat sequence linked to a guide sequence; and detecting a change in a readout that is indicative of a reduction or an augmentation of a cell signaling event associated with, e.g., a mutation in a disease gene contained in the cell.

[0762] A cell model or animal model can be constructed in combination with the method of the invention for screening a cellular function change. Such a model may be used to study the effects of a genome sequence modified by the CRISPR complex of the invention on a cellular function of interest. For example, a cellular function model may be used to study the effect of a modified genome sequence on intracellular signaling or extracellular signaling. Alternatively, a cellular function model may be used to study the effects of a modified genome sequence on sensory perception. In some such models, one or more genome sequences associated with a signaling biochemical pathway in the model are modified.

[0763] Several disease models have been specifically investigated. These include de novo autism risk genes CHD8, KATNAL2, and SCN2A; and the syndromic autism (Angelman Syndrome) gene UBE3A. These genes and resulting autism models are of course preferred, but serve to show the broad applicability of the invention across genes and corresponding models.

[0764] An altered expression of one or more genome sequences associated with a signalling biochemical pathway can be determined by assaying for a difference in the mRNA levels of the corresponding genes between the test model cell and a control cell, when they are contacted with a candidate agent. Alternatively, the differential expression of the sequences associated with a signaling biochemical pathway is determined by detecting a difference in the level of the encoded polypeptide or gene product.

[0765] To assay for an agent-induced alteration in the level of mRNA transcripts or corresponding polynucleotides, nucleic acid contained in a sample is first extracted according to standard methods in the art. For instance, mRNA can be isolated using various lytic enzymes or chemical solutions according to the procedures set forth in Sambrook et al. (1989), or extracted by nucleic-acid-binding resins following the accompanying instructions provided by the manufacturers. The mRNA contained in the extracted nucleic acid sample is then detected by amplification procedures or conventional hybridization assays (e.g. Northern blot analysis) according to methods widely known in the art or based on the methods exemplified herein.

[0766] For purpose of this invention, amplification means any method employing a primer and a polymerase capable of replicating a target sequence with reasonable fidelity. Amplification may be carried out by natural or recombinant DNA polymerases such as TaqGold™, T7 DNA polymerase, Klenow fragment of E.coli DNA polymerase, and reverse transcriptase. A preferred amplification method is PCR. In particular, the isolated RNA can be subjected to a reverse transcription assay that is coupled with a quantitative polymerase chain reaction (RT-PCR) in order to quantify the expression level of a sequence associated with a signaling biochemical pathway.

[0767] Detection of the gene expression level can be conducted in real time in an amplification assay. In one aspect, the amplified products can be directly visualized with fluorescent DNA-binding agents including but not limited to DNA intercalators and DNA groove binders. Because the amount of the intercalators incorporated into the double-stranded DNA molecules is typically proportional to the amount of the amplified DNA products, one can conveniently determine the amount of the amplified products by quantifying the fluorescence of the intercalated dye using conventional optical systems in the art. DNA-binding dye suitable for this application include SYBR green, SYBR blue, DAPI, propidium iodine, Hoeste, SYBR gold, ethidium bromide, acridines, proflavine, acridine orange, acriflavine, fluorcoumanin, ellipticine, daunomycin, chloroquine, distamycin D, chromomycin, homidium, mithramycin, ruthenium polypyridyls, anthramycin, and the like.

[0768] In another aspect, other fluorescent labels such as sequence specific probes can be employed in the amplification reaction to facilitate the detection and quantification of the amplified products. Probe-based quantitative amplification relies on the sequence-specific detection of a desired amplified product. It utilizes fluorescent, target-specific probes (e.g., TaqMan® probes) resulting in increased specificity and sensitivity. Methods for performing probe-based quantitative amplification are well established in the art and are taught in U.S. Pat. No. 5,210,015.

[0769] In yet another aspect, conventional hybridization assays using hybridization probes that share sequence homology with sequences associated with a signaling biochemical pathway can be performed. Typically, probes are allowed to form stable complexes with the sequences associated with a signaling biochemical pathway contained within the biological sample derived from the test subject in a hybridization reaction. It will be appreciated by one of skill in the art that where antisense is used as the probe nucleic acid, the target polynucleotides provided in the sample are chosen to be complementary to sequences of the antisense nucleic acids. Conversely, where the nucleotide probe is a sense nucleic acid, the target polynucleotide is selected to be complementary to sequences of the sense nucleic acid.

[0770] Hybridization can be performed under conditions of various stringency. Suitable hybridization conditions for the practice of the present invention are such that the recognition interaction between the probe and sequences associated with a signaling biochemical pathway is both sufficiently specific and sufficiently stable. Conditions that increase the stringency of a hybridization reaction are widely known and published in the art. See, for example, (Sambrook, et al., (1989); Nonradioactive In Situ Hybridization Application Manual, Boehringer Mannheim, second edition). The hybridization assay can be formed using probes immobilized on any solid support, including but are not limited to nitrocellulose, glass, silicon, and a variety of gene arrays. A preferred hybridization assay is conducted on high-density gene chips as described in U.S. Pat. No. 5,445,934.

[0771] For a convenient detection of the probe-target complexes formed during the hybridization assay, the nucleotide probes are conjugated to a detectable label. Detectable labels suitable for use in the present invention include any composition detectable by photochemical, biochemical, spectroscopic, immunochemi cal, electrical, optical or chemical means. A wide variety of appropriate detectable labels are known in the art, which include fluorescent or chemiluminescent labels, radioactive isotope labels, enzymatic or other ligands. In preferred embodiments, one will likely desire to employ a fluorescent label or an enzyme tag, such as digoxigenin, β-galactosidase, urease, alkaline phosphatase or peroxidase, avidin/biotin complex.

[0772] The detection methods used to detect or quantify the hybridization intensity will typically depend upon the label selected above. For example, radiolabels may be detected using photographic film or a phosphoimager. Fluorescent markers may be detected and quantified using a photodetector to detect emitted light. Enzymatic labels are typically detected by providing the enzyme with a substrate and measuring the reaction product produced by the action of the enzyme on the substrate; and finally colorimetric labels are detected by simply visualizing the colored label.

[0773] An agent-induced change in expression of sequences associated with a signaling biochemical pathway can also be determined by examining the corresponding gene products. Determining the protein level typically involves a) contacting the protein contained in a biological sample with an agent that specifically bind to a protein associated with a signaling biochemical pathway; and (b) identifying any agent:protein complex so formed. In one aspect of this embodiment, the agent that specifically binds a protein associated with a signaling biochemical pathway is an antibody, preferably a monoclonal antibody.

[0774] The reaction is performed by contacting the agent with a sample of the proteins associated with a signaling biochemical pathway derived from the test samples under conditions that will allow a complex to form between the agent and the proteins associated with a signaling biochemical pathway. The formation of the complex can be detected directly or indirectly according to standard procedures in the art. In the direct detection method, the agents are supplied with a detectable label and unreacted agents may be removed from the complex; the amount of remaining label thereby indicating the amount of complex formed. For such method, it is preferable to select labels that remain attached to the agents even during stringent washing conditions. It is preferable that the label does not interfere with the binding reaction. In the alternative, an indirect detection procedure may use an agent that contains a label introduced either chemically or enzymatically. A desirable label generally does not interfere with binding or the stability of the resulting agent:polypeptide complex. However, the label is typically designed to be accessible to an antibody for an effective binding and hence generating a detectable signal.

[0775] A wide variety of labels suitable for detecting protein levels are known in the art. Non-limiting examples include radioisotopes, enzymes, colloidal metals, fluorescent compounds, bioluminescent compounds, and chemiluminescent compounds.

[0776] The amount of agent:polypeptide complexes formed during the binding reaction can be quantified by standard quantitative assays. As illustrated above, the formation of agent:polypeptide complex can be measured directly by the amount of label remained at the site of binding. In an alternative, the protein associated with a signaling biochemical pathway is tested for its ability to compete with a labeled analog for binding sites on the specific agent. In this competitive assay, the amount of label captured is inversely proportional to the amount of protein sequences associated with a signaling biochemical pathway present in a test sample.

[0777] A number of techniques for protein analysis based on the general principles outlined above are available in the art. They include but are not limited to radioimmunoassays, ELISA (enzyme linked immunoradiometric assays), “sandwich” immunoassays, immunoradiometric assays, in situ immunoassays (using e.g., colloidal gold, enzyme or radioisotope labels), western blot analysis, immunoprecipitation assays, immunofluorescent assays, and SDS-PAGE.

[0778] Antibodies that specifically recognize or bind to proteins associated with a signaling biochemical pathway are preferable for conducting the aforementioned protein analyses. Where desired, antibodies that recognize a specific type of post-translational modifications (e.g., signaling biochemical pathway inducible modifications) can be used. Post-translational modifications include but are not limited to glycosylation, lipi dation, acetylati on, and phosphorylation. These antibodies may be purchased from commercial vendors. For example, anti-phosphotyrosine antibodies that specifically recognize tyrosine-phosphorylated proteins are available from a number of vendors including Invitrogen and. Perkin Elmer. Antiphosphotyrosine antibodies are particularly useful in detecting proteins that are differentially phosphorylated on their tyrosine residues in response to an ER stress. Such proteins include but are not limited to eukaryotic translation initiation factor 2 alpha (eIF-2α). Alternatively, these antibodies can be generated using conventional polyclonal or monoclonal antibody technologies by immunizing a host animal or an antibody-producing cell with a target protein that exhibits the desired post-translational modification.

[0779] In practicing the subject method, it may be desirable to discern the expression pattern of an protein associated with a signaling biochemical pathway in different bodily tissue, in different cell types, and/or in different subcellular structures. These studies can be performed with the use of tissue-specific, cell-specific or subcellular structure specific antibodies capable of binding to protein markers that are preferentially expressed in certain tissues, cell types, or subcellular structures.

[0780] An altered expression of a gene associated with a signaling biochemical pathway can also be determined by examining a change in activity of the gene product relative to a control cell. The assay for an agent-induced change in the activity of a protein associated with a signaling biochemical pathway will dependent on the biological activity and/or the signal transduction pathway that is under investigation. For example, where the protein is a kinase, a change in its ability to phosphorylate the downstream substrate(s) can be determined by a variety of assays known in the art. Representative assays include but are not limited to immunoblotting and immunoprecipitation with antibodies such as anti-phosphotyrosine antibodies that recognize phosphorylated proteins. In addition, kinase activity can be detected by high throughput chemiluminescent assays such as AlphaScreen™ (available from Perkin Elmer) and eTag™ assay (Chan-Hui, et al. (2003) Clinical Immunology 111: 162-174).

[0781] Where the protein associated with a signaling biochemical pathway is part of a signaling cascade leading to a fluctuation of intracellular pH condition, pH sensitive molecules such as fluorescent pH dyes can be used as the reporter molecules. In another example where the protein associated with a signaling biochemical pathway is an ion channel, fluctuations in membrane potential and/or intracellular ion concentration can be monitored. A number of commercial kits and high-throughput devices are particularly suited for a rapid and robust screening for modulators of ion channels. Representative instruments include FLIPR™ (Molecular Devices, Inc.) and. VIPR (Aurora Biosciences). These instruments are capable of detecting reactions in over 1000 sample wells of a microplate simultaneously, and providing real-time measurement and functional data within a second or even a minisecond.

[0782] In practicing any of the methods disclosed herein, a suitable vector can be introduced to a cell or an embryo via one or more methods known in the art, including without limitation, microinjection, electroporation, sonoporation, biolistics, calcium phosphate-mediated transfection, cationic transfection, liposome transfection, dendrimer transfection, heat shock transfection, nucleofection transfection, magnetofection, lipofection, impalefection, optical transfection, proprietary agent-enhanced uptake of nucleic acids, and delivery via liposomes, immunoliposomes, virosomes, or artificial virions. In some methods, the vector is introduced into an embryo by microinjection. The vector or vectors may be microinjected into the nucleus or the cytoplasm of the embryo. In some methods, the vector or vectors may be introduced into a cell by nucleofection.

[0783] The target polynucleotide of a CRISPR complex can be any polynucleotide endogenous or exogenous to the eukaryotic cell. For example, the target polynucleotide can be a polynucleotide residing in the nucleus of the eukaryotic cell. The target polynucleotide can be a sequence coding a gene product (e.g., a protein) or a non-coding sequence (e.g., a regulatory polynucleotide or a junk DNA).

[0784] Examples of target polynucleotides include a sequence associated with a signaling biochemical pathway, e.g., a signaling biochemical pathway-associated gene or polynucleotide. Examples of target polynucleotides include a disease associated gene or polynucleotide. A “disease-associated” gene or polynucleotide refers to any gene or polynucleotide which is yielding transcription or translation products at an abnormal level or in an abnormal form in cells derived from a disease-affected tissues compared with tissues or cells of a non disease control. It may be a gene that becomes expressed at an abnormally high level; it may be a gene that becomes expressed at an abnormally low level, where the altered expression correlates with the occurrence and/or progression of the disease. A disease-associated gene also refers to a gene possessing mutation(s) or genetic variation that is directly responsible or is in linkage disequilibrium with a gene(s) that is responsible for the etiology of a disease. The transcribed or translated products may be known or unknown, and may be at a normal or abnormal level.

[0785] The target polynucleotide of a CRISPR complex can be any polynucleotide endogenous or exogenous to the eukaryotic cell. For example, the target polynucleotide can be a polynucleotide residing in the nucleus of the eukaryotic cell. The target polynucleotide can be a sequence coding a gene product (e.g., a protein) or a non-coding sequence (e.g., a regulatory polynucleotide or a junk DNA). Without wishing to be bound by theory, it is believed that the target sequence should be associated with a PAM (protospacer adjacent motif); that is, a short sequence recognized by the CRISPR complex. The precise sequence and length requirements for the PAM differ depending on the CRISPR enzyme used, but PAMs are typically 2-5 base pair sequences adjacent the protospacer (that is, the target sequence) Examples of PAM sequences are given in the examples section below, and the skilled person will be able to identify further PAM sequences for use with a given CRISPR enzyme.

[0786] The target polynucleotide of a CRISPR complex may include a number of disease associated genes and polynucleotides as well as signaling biochemical pathway-associated genes and polynucleotides as listed in U.S. provisional patent applications 61/736,527 and 61/748,427 both entitled SYSTEMS :METHODS ANI) COMPOSITIONS FOR SEQUENCE MANIPULATION filed on Dec.r 12, 2012 and Jan. 2, 2013, respectively, and PCT Application PCT/US2013/074667, entitled DELIVERY, ENGINEERING AND OPTIMIZATION OF SYSTEMS, METHODS AND COMPOSITIONS FOR SEQUENCE MANIPULATION AND THERAPEUTIC APPLICATIONS, filed Dec. 12, 2013, the contents of all of which are herein incorporated by reference in their entirety.

[0787] Examples of target polynucleotides include a sequence associated with a signaling biochemical pathway, e.g., a signaling biochemical pathway-associated gene or polynucleotide. Examples of target polynucleotides include a disease associated gene or polynucleotide. A “disease-associated” gene or polynucleotide refers to any gene or polynucleotide which is yielding transcription or translation products at an abnormal level or in an abnormal form in cells derived from a disease-affected tissues compared with tissues or cells of a non disease control. It may be a gene that becomes expressed at an abnormally high level; it may be a gene that becomes expressed at an abnormally low level, where the altered expression correlates with the occurrence and/or progression of the disease, A disease-associated gene also refers to a gene possessing mutation(s) or genetic variation that is directly responsible or is in linkage disequilibrium with a gene(s) that is responsible for the etiology of a disease. The transcribed or translated products may be known or unknown, and may be at a normal or abnormal level.

### Genome Wide Knock-Out Screening

[0788] The CRISPR effector protein complexes described herein can be used to perform efficient and cost effective functional genomic screens. Such screens can utilize CRISPR effector protein based genome wide libraries, Such screens and libraries can provide for determining the function of genes, cellular pathways genes are involved in, and how any alteration in gene expression can result in a particular biological process. An advantage of the present invention is that the CRISPR system avoids off-target binding and its resulting side effects. This is achieved using systems arranged to have a high degree of sequence specificity for the target DNA. In preferred embodiments of the invention, the CRISPR effector protein complexes are C2c2 effector protein complexes.

[0789] In embodiments of the invention, a genome wide library may comprise a plurality of C2c2 guide RNAs, as described herein, comprising guide sequences that are capable of targeting a plurality of target sequences in a plurality of genomic loci in a population of eukaryotic cells. The population of cells may be a population of embryonic stem (ES) cells. The target sequence in the genomic locus may be a non-coding sequence. The non-coding sequence may be an intron, regulatory sequence, splice site, 3′ UTR, 5′ UTR, or polyadenylation Gene function of one or more gene products may be altered by said targeting. The targeting may result in a knockout of gene function. The targeting of a gene product may comprise more than one guide RNA. A gene product may be targeted by 2, 3, 4, 5, 6, 7, 8, 9, or 10 guide RNAs, preferably 3 to 4 per gene. Off-target modifications may be minimized by exploiting the staggered double strand breaks generated by C2c2 effector protein complexes or by utilizing methods analogous to those used in CRISPR-Cas9 systems (See, e.g., DNA targeting specificity of RNA-guided Cas9 nucleases. Hsu, P., Scott, D., Weinstein, J., Ran, Konerma.nn, S., Agarwala, V. Li, Y., Fine, E., Wu, X., Shalem, O., Cradick, T J., Marraffini, L A., Bao, G., & Zhang, F. Nat Biotechnol doi:10.1038/nbt.2647 (2013)), incorporated herein by reference. The targeting may be of about 100 or more sequences. The targeting may be of about 1000 or more sequences. The targeting may be of about 20,000 or more sequences. The targeting may be of the entire genorne. The targeting may be of a panel of target sequences focused on a relevant or desirable pathway. The pathway may be an immune pathway. The pathway may be a cell division pathway.

[0790] One aspect of the invention comprehends a genome or transcriptome wide library that may comprise a plurality of C2c2 guide RNAs that may comprise guide sequences that are capable of targeting a plurality of target sequences in a plurality of (genomic) loci, wherein said targeting results in a knockout/knockdown of gene function. This library may potentially comprise guide RNAs that target each and every gene in the genome of an organism,

[0791] In some embodiments of the invention the organism or subject is a eukaryote (including mammal including human) or a non-human eukaryote or a non-human animal or a non-human mammal. In some embodiments, the organism or subject is a non-human animal, and may be an arthropod, for example, an insect, or may be a nematode. In some methods of the invention the organism or subject is a plant. In some methods of the invention the organism or subject is a mammal or a non-human mammal. A non-human mammal may be for example a rodent (preferably a mouse or a rat), an ungulate, or a primate. In some methods of the invention the organism or subject is algae, including microalgae, or is a fungus.

[0792] The knockout/knockdown of gene function may comprise: introducing into each cell in the population of cells a vector system of one or more vectors comprising an engineered, non-naturally occurring C2c2 effector protein system comprising I. a C2c2 effector protein, and II. one or more guide RNAs, wherein components I and II may be same or on different vectors of the system, integrating components I and II into each cell, wherein the guide sequence targets a unique gene in each cell, wherein the C2c2 effector protein is operably linked to a regulatory element, wherein when transcribed, the guide RNA comprising the guide sequence directs sequence-specific binding of the C2c2 effector protein system to a target sequence corresponding to the genomic loci of the unique gene, inducing cleavage of the RNA corresponding to said genomic loci by the C2c2 effector protein, and confirming different knockdown events in a plurality of unique genes in each cell of the population of cells thereby generating a gene knockdown cell library. The invention comprehends that the population of cells is a population of eukaryotic cells, and in a preferred embodiment, the population of cells is a population of embryonic stem (ES) cells.

[0793] The one or more vectors may be plasmid vectors. The vector may be a single vector comprising a C2c2 effector protein, a sgRNA, and optionally, a selection marker into target cells. Not being bound by a theory, the ability to simultaneously deliver a C2c2 effector protein and sgRNA through a single vector enables application to any cell type of interest, without the need to first generate cell lines that express the C2c2 effector protein. The regulatory element may be an inducible promoter. The inducible promoter may be a doxycycline inducible promoter. In some methods of the invention the expression of the guide sequence is under the control of the T7 promoter and is driven by the expression of T7 polymerase. The confirming of different knockdown events may be by whole transcriptome sequencing. The knockout mutation may be achieved in 100 or more unique genes. The knockdown event may be achieved in 1000 or more unique genes. The knockdown event may be achieved in 20,000 or more unique genes. The knockdown event may be achieved in the entire genome. The knockdown of gene function may be achieved in a plurality of unique genes which function in a particular physiological pathway or condition. The pathway or condition may be an immune pathway or condition. The pathway or condition may be a cell division pathway or condition.

[0794] The invention also provides kits that comprise the transcriptotne wide libraries mentioned herein. The kit may comprise a single container comprising vectors or plasmids comprising the library of the invention. The kit may also comprise a panel comprising a selection of unique C2c2 effector protein system guide RNAs comprising guide sequences from the library of the invention, wherein the selection is indicative of a particular physiological condition. The invention comprehends that the targeting is of about 100 or more sequences, about 1000 or more sequences or about 20,000 or more sequences or the entire transcriptome. Furthermore, a panel of target sequences may be focused on a relevant or desirable pathway, such as an immune pathway or cell division.

[0795] In an additional aspect of the invention, the C2c2 effector protein may comprise one or more mutations and may be used as a generic RNA binding protein with or without fusion to a functional domain. The mutations may be artificially introduced mutations or gain- or loss-of-function mutations. The mutations have been characterized as described herein. In one aspect of the invention, the functional domain may be a transcriptional activation domain, which may be VP64. In other aspects of the invention, the functional domain may be a transcriptional repressor domain, which may be KRAB or SID4X. Other aspects of the invention relate to the mutated C2c2 effector protein being fused to domains which include but are not limited to a transcriptional activator, repressor, a recombinase, a transposase, a histone remodeler, a demethylase, a DNA methyltransferase, a cryptochrome, a light inducible/controllable domain or a chemically inducible/controllable domain. Some methods of the invention can include inducing expression of targeted genes. In one embodiment, inducing expression by targeting a plurality of target sequences in a plurality of genomic loci in a population of eukaryotic cells is by use of a functional domain.

[0796] Useful in the practice of the instant invention utilizing C2c2 3effector protein complexes are methods used in CRISPR-Cas9 systems and reference is made to:

[0797] Genome-Scale CRISPR-Cas9 Knockout Screening in Human Cells. Shalem, O., Sanjana, N E., Hartenian, E., Shi, X., Scott, D A., Mikkelson, T., Heckl, D., Ebert, B L., Root, D E., Doench, J G., Zhang, F. Science December 12, (2013). [Epub ahead of print]; Published in final edited form as: Science. 2014 Jan. 3; 343(6166): 84-87.

[0798] Shalem et al. involves a new way to interrogate gene function on a genome-wide scale. Their studies showed that delivery of a genome-scale CRISPR-Cas9 knockout (GeCKO) library targeted 18,080 genes with 64,751 unique guide sequences enabled both negative and positive selection screening in human cells. First, the authors showed use of the GeCKO library to identify genes essential for cell viability in cancer and pluripotent stem cells. Next, in a melanoma model, the authors screened for genes whose loss is involved in resistance to vemurafenib, a therapeutic that inhibits mutant protein kinase BRAF. Their studies showed that the highest-ranking candidates included previously validated genes NF1 and MED12 as well as novel hitsNF2, CUL3, TADA2B, and TADAL The authors observed a high level of consistency between independent guide RNAs targeting the same gene and a high rate of hit confirmation, and thus demonstrated the promise of genome-scale screening with Cas9.

[0799] Reference is also made to US patent publication number US20140357530; and PCT Patent Publication WO2014093701, hereby incorporated herein by reference.

### Functional Alteration and Screening

[0800] In another aspect, the present invention provides for a method of functional evaluation and screening of genes. The use of the CRISPR system of the present invention to precisely deliver functional domains, to activate or repress genes or to alter epigenetic state by precisely altering the methylation site on a a specific locus of interest, can be with one or more guide RNAs applied to a single cell or population of cells or with a library applied to genome in a pool of cells ex vivo or in vivo comprising the administration or expression of a library comprising a plurality of guide RNAs (sgRNAs) and wherein the screening further comprises use of a C2c2 effector protein, wherein the CRISPR complex comprising the C2c2 effector protein is modified to comprise a heterologous functional domain. In an aspect the invention provides a method for screening a genome/transcriptome comprising the administration to a host or expression in a host in vivo of a library. In an aspect the invention provides a method as herein discussed further comprising an activator administered to the host or expressed in the host. In an aspect the invention provides a method as herein discussed wherein the activator is attached to a C2c2 effector protein. in an aspect the invention provides a method as herein discussed wherein the activator is attached to the N terminus or the C terminus of the C2c2 effector protein. In an aspect the invention provides a method as herein discussed wherein the activator is attached to a sgRNA loop. In an aspect the invention provides a method as herein discussed further comprising a repressor administered to the host or expressed in the host. In an aspect the invention provides a method as herein discussed, wherein the screening comprises affecting and detecting gene activation, gene inhibition, or cleavage in the locus.

[0801] In an aspect, the invention provides efficient on-target activity and minimizes off target activity. In an aspect, the invention provides efficient on-target cleavage by C2c2 effector protein and minimizes off-target cleavage by the C2c2 effector protein. In an aspect, the invention provides guide specific binding of C2c2 effector protein at a locus without DNA cleavage. Accordingly, in an aspect, the invention provides target-specific gene regulation. In an aspect, the invention provides guide specific binding of C2c2 effector protein at a gene locus without DNA cleavage. Accordingly, in an aspect, the invention provides for cleavage at one locus and gene regulation at a different locus using a single C2c2 effector protein. In an aspect, the invention provides orthogonal activation and/or inhibition and/or cleavage of multiple targets using one or more C2c2 effector protein and/or enzyme.

[0802] In an aspect the invention provides a method as herein discussed, wherein the host is a eukaryotic cell. In an aspect the invention provides a method as herein discussed, wherein the host is a mammalian cell. In an aspect the invention provides a method as herein discussed, wherein the host is a non-human eukaryote. In an aspect the invention provides a method as herein discussed, wherein the non-human eukaryote is a non-human mammal. in an aspect the invention provides a method as herein discussed, wherein the non-human mammal is a mouse. An aspect the invention provides a method as herein discussed comprising the delivery of the C2c2 effector protein complexes or component(s) thereof or nucleic acid molecule(s) coding therefor, wherein said nucleic acid molecule(s) are operatively linked to regulatory sequence(s) and expressed in vivo. In an aspect the invention provides a method as herein discussed wherein the expressing in vivo is via a lentivirus, an adenovirus, or an AAV. In an aspect the invention provides a method as herein discussed wherein the delivery is via a particle, a nanoparticle, a lipid or a cell penetrating peptide (CPP).

[0803] In an aspect the invention provides a pair of CRISPR complexes comprising C2c2 effector protein, each comprising a guide RNA (sgRNA) comprising a guide sequence capable of hybridizing to a target sequence in a genomic locus of interest in a cell, wherein at least one loop of each sgRNA is modified by the insertion of distinct RNA sequence(s) that bind to one or more adaptor proteins, and wherein the adaptor protein is associated with one or more functional domains, wherein each sgRNA of each C2c2 effector protein complex comprises a functional domain having a DNA cleavage activity. in an aspect the invention provides paired C2C1 or C2c3 effector protein complexes as herein-discussed, wherein the DNA cleavage activity is due to a Fok1 nuclease.

[0804] In an aspect the invention provides a method for cutting a target sequence in a genomic locus of interest comprising delivery to a cell of the C2c2 effector protein complexes or component(s) thereof or nucleic acid molecule(s) coding therefor, wherein said nucleic acid molecule(s) are operatively linked to regulatory sequence(s) and expressed in vivo. In an aspect the invention provides a method as herein-discussed wherein the delivery is via a lentivirus, an adenovirus, or an AAV. In an aspect the invention provides a method as herein-discussed or paired C2c2 effector protein complexes as herein-discussed wherein the target sequence for a first complex of the pair is on a first strand of double stranded DNA and the target sequence for a second complex of the pair is on a second strand of double stranded DNA. In an aspect the invention provides a method as herein-discussed or paired C2c2 effector protein complexes as herein-discussed wherein the target sequences of the first and second complexes are in proximity to each other such that the DNA is cut in a manner that facilitates homology directed repair. In an aspect a herein method can further include introducing into the cell template DNA. In an aspect a herein method or herein paired C2c2 effector protein complexes can involve wherein each C2c2 effector protein complex has a C2c2 effector enzyme that is mutated such that it has no more than about 5% of the nuclease activity of the C2c2 effector enzyme that is not mutated.

[0805] In an aspect the invention provides a library, method or complex as herein-discussed wherein the sgRNA is modified to have at least one non-coding functional loop, e.g., wherein the at least one non-coding functional loop is repressive; for instance, wherein the at least one non-coding functional loop comprises Alu.

[0806] In one aspect, the invention provides a method for altering or modifying expression of a gene product. The said method may comprise introducing into a cell containing and expressing a DNA molecule encoding the gene product an engineered, non-naturally occurring CRISPR system comprising a C2c2 effector protein and guide RNA that targets the DNA molecule, whereby the guide RNA targets the DNA molecule encoding the gene product and the C2c2 effector protein cleaves the DNA molecule encoding the gene product, whereby expression of the gene product is altered; and, wherein the C2c2 effector protein and the guide RNA do not naturally occur together. The invention comprehends the guide RNA comprising a guide sequence linked to a direct repeat sequence. The invention further comprehends the C2c2 effector protein being codon optimized for expression in a Eukaryotic cell. In a preferred embodiment the Eukaryotic cell is a mammalian cell and in a more preferred embodiment the mammalian cell is a human cell. In a further embodiment of the invention, the expression of the gene product is decreased.

[0807] In some embodiments, one or more functional domains are associated with the C2c2 effector protein. In some embodiments, one or more functional domains are associated with an adaptor protein, for example as used with the modified guides of Konnerman et al. (Nature 517, 583-588, 29 Jan. 2015). In some embodiments, one or more functional domains are associated with an dead sgRNA (dRNA). In some embodiments, a dRNA. complex with active C2c2 effector protein directs gene regulation by a functional domain at on gene locus while an sgRNA directs DNA cleavage by the active C2c2 effector protein at another locus, for example as described analogously in CRISPR-Cas9 systems by Dahlman et al., ‘Orthogonal gene control with a catalytically active Cas9 nuclease’ (in press). In some embodiments, dRNAs are selected to maximize selectivity of regulation for a gene locus of interest compared to off-target regulation. In some embodiments, dRNAs are selected to maximize target gene regulation and minimize target cleavage

[0808] For the purposes of the following discussion, reference to a functional domain could be a functional domain associated with the C2c2 effector protein or a functional domain associated with the adaptor protein.

[0809] In some embodiments, the one or more functional domains is an NLS (Nuclear .Localization Sequence) or an NES (Nuclear Export Signal). In some embodiments, the one or more functional domains is a transcriptional activation domain comprises VP64, p65, MyoD1,

[0810] RTA, SET7/9 and a historic acetyltransferase. Other references herein to activation (or activator) domains in respect of those associated with the CRISPR enzyme include any known transcriptional activation domain and specifically VP64, p65, MyoD1, HSFI, RTA, SET7/9 or a hi stone acetyltransferase.

[0811] In some embodiments, the one or more functional domains is a transcriptional repressor domain. In some embodiments, the transcriptional repressor domain is a KRAB domain. In some embodiments, the transcriptional repressor domain is a NuE domain, NcoR domain, SID domain or a SID4X domain.

[0812] In some embodiments, the one or more functional domains have one or more activities comprising translation activation activity, translation repression activity, methylase activity, demethylase activity, transcription activation activity, transcription repression activity, transcription release factor activity, historic modification activity, RNA cleavage activity, DNA cleavage activity, DNA_{—} integration activity or nucleic acid binding activity.

[0813] Histone modifying domains are also preferred in some embodiments. Exemplary histone modifying domains are discussed below. Transposase domains, FIR (Homologous Recombination) machinery domains, recombinase domains, and/or integrase domains are also preferred as the present functional domains. In some embodiments, DNA integration activity includes HR machinery domains, integrase domains, recombinase domains and/or transposase domains, Histone acetyltransferases are preferred in some embodiments.

[0814] In some embodiments, the DNA cleavage activity is due to a nuclease. In some embodiments, the nuclease comprises a Fokl nuclease. See, “Dimeric CRISPR RNA-guided. Fold nucleases for highly specific genome editing”, Shengdar Q. Tsai, Nicolas Wyvekens, Cyd Khayter, Jennifer A. Foden, Vishal Thapar, Deepak Reyon, Mathew J. Goodwin, Martin J. Aryee, J. Keith Joung Nature Biotechnology 32(6): 569-77 (2014), relates to dimeric RNA-guided FokI Nucleases that recognize extended sequences and can edit endogenous genes with high efficiencies in human cells.

[0815] In some embodiments, the one or more functional domains is attached to the C2c2 effector protein so that upon binding to the sgRNA and target the functional domain is in a spatial orientation allowing for the functional domain to function in its attributed function.

[0816] In some embodiments, the one or more functional domains is attached to the adaptor protein so that upon binding of the C2c2 effector protein to the sgRNA and target, the functional domain is in a spatial orientation allowing fur the functional domain to function in its attributed function.

[0817] In an aspect the invention provides a composition as herein discussed wherein the one or more functional domains is attached to the C2c2 effector protein or adaptor protein via a linker, optionally a GlySer linker, as discussed herein.

[0818] Endogenous transcriptional repression is often mediated by chromatin modifying enzymes such as histone methyltransferases (HMTs) and deacetylases (HDACs). Repressive histone effector domains are known and an exemplary list is provided below. In the exemplary table, preference was given to proteins and functional truncations of small size to facilitate efficient viral packaging (for instance via AAV). In general, however, the domains may include HDACs, histone methyltransferases (HMTs), and histone acetyltransferase (HAT) inhibitors, as well as HDAC and HMT recruiting proteins. The functional domain may be or include, in some embodiments, HDAC Effector Domains, HDAC Recruiter Effector Domains, Histone Methyltransferase (HMT) Effector Domains, Histone Methyltransferase (HMT) Recruiter Effector Domains, or Histone Acetyltransferase Inhibitor Effector Domains.

### HDAC Effector Domains

| | | | | | Full | Selected | Final | |
|---|---|---|---|---|---|---|---|---|
| Subtype/ | | Substrate | Modification | | size | truncation | size | Catalytic |
| Complex | Name | (if known) | (if known) | Organism | (aa) | (aa) | (aa) | domain |
| HDAC I | HDAC8 | — | — | X. laevis | 325 | 1-325 | 325 | 1-272: |
| | | | | | | | | HDAC |
| HDAC I | RPD3 | — | — | S. cerevisiae | 433 | 19-340 | 322 | 19-331: |
| | | | | | | | (Vannier) | HDAC |
| HDAC | MesoLo4 | — | — | M. loti | 300 | 1-300 | 300 | — |
| IV | | | | | | (Gregoretti) | | |
| HDAC | HDAC11 | — | — | H. sapiens | 347 | 1-347 | 347 | 14-326: |
| IV | | | | | | (Gao) | | HDAC |
| HD2 | HDT1 | — | — | A. thaliana | 245 | 1-211 | 211 | — |
| | | | | | | (Wu) | | |
| SIRT I | SIRT3 | H3K9Ac | — | H. sapiens | 399 | 143-399 | 257 | 126-382: |
| | | H4K16Ac | | | | (Scher) | | SIRT |
| | | H3K56Ac | | | | | | |
| SIRT I | HST2 | — | — | C. albicans | 331 | 1-331 | 331 | — |
| | | | | | | (Hnisz) | | |
| SIRT I | CobB | — | — | E. coli | 242 | 1-242 | 242 | — |
| | | | | (K12) | | (Landry) | | |
| SIRT I | HST2 | — | — | S. cerevisiae | 357 | 8-298 | 291 | — |
| | | | | | | (Wilson) | | |
| SIRT III | SIRT5 | H4K8Ac | — | H. sapiens | 310 | 37-310 | 274 | 41-309: |
| | | H4K16Ac | | | | (Gertz) | | SIRT |
| SIRT III | Sir2A | — | — | P. falciparum | 273 | 1-273 | 273 | 19-273: |
| | | | | | | (Zhu) | | SIRT |
| SIRT IV | SIRT6 | H3K9Ac | — | H. sapiens | 355 | 1-289 | 289 | 35-274: |
| | | H3K56Ac | | | | (Tennen) | | SIRT |

[0820] Accordingly, the repressor domains of the present invention may be selected from histone methyltransferases (HMTs), histone deacetylases (HDACs), histone acetyltransferase (HAT) inhibitors, as well as HDAC and HMT recruiting proteins.

[0821] The HDAC domain may be any of those in the table above, namely: HDAC8, RPD3, MesoLo4, HDAC11, HDT1, SIRT3, HST2, CobB, HST2, SIRT5, Sir2A, or SIRT6.

[0822] In some embodiment, the functional domain may be a HDAC Recruiter Effector Domain. Preferred examples include those in the Table below, namely MeCP2, MBD2b, Sin3a, NcoR, SALL1, RCOR1. NcoR is exemplified in the present Examples and, although preferred, it is envisaged that others in the class will also be useful. Table of HDAC Recruiter Effector Domains

| | | | | | Full | Selected | Final | |
|---|---|---|---|---|---|---|---|---|
| Subtype/ | | Substrate | Modification | | size | truncation | size | Catalytic |
| Complex | Name | (if known) | (if known) | Organism | (aa) | (aa) | (aa) | domain |
| Sin3a | MeCP2 | — | — | R. norvegicus | 492 | 207-492 | 286 | — |
| | | | | | | (Nan) | | |
| Sin3a | MBD2b | — | — | H. sapiens | 262 | 45-262 | 218 | — |
| | | | | | | (Boeke) | | |
| Sin3a | Sin3a | — | — | H. sapiens | 1273 | 524-851 | 328 | 627-829: |
| | | | | | | (Laherty) | | HDAC1 |
| | | | | | | | | interaction |
| NcoR | NcoR | — | — | H. sapiens | 2440 | 420-488 | 69 | — |
| | | | | | | (Zhang) | | |
| NuRD | SALL1 | — | — | M. musculus | 1322 | 1-93 | 93 | — |
| | | | | | | (Lauberth) | | |
| CoREST | RCOR1 | — | — | H. sapiens | 482 | 81-300 | 220 | — |
| | | | | | | (Gu, Ouyang) | | |

[0823] In some embodiment, the functional domain may be a Methyltransferase (HMT) Effector Domain. Preferred examples include those in the Table below, namely NUE, vSET, EHMT2/G9A, SUV39H1, dim-5, KYP, SUVR4, SET4, SET1, SETD8, and TgSET8. NUE is exemplified in the present Examples and, although preferred, it is envisaged that others in the class will also be useful.

### Table of Histone Methyltransferase (HMT) Effector Domains

| | | | | | Full | Selected | Final | |
|---|---|---|---|---|---|---|---|---|
| Subtype/ | | Substrate | Modification | | size | truncation | size | Catalytic |
| Complex | Name | (if known) | (if known) | Organism | (aa) | (aa) | (aa) | domain |
| SET | NUE | H2B, | — | C. trachomatis | 219 | 1-219 | 219 | — |
| | | H3, H4 | | | | (Pennini) | | |
| SET | vSET | — | H3K27me3 | P. bursaria | 119 | 1-119 | 119 | 4-112: |
| | | | | chlorella | | (Mujtaba) | | SET2 |
| | | | | virus | | | | |
| SUV39 | EHMT2/G9A | H1.4K2, | H3K9me1/2, | M. musculus | 1263 | 969-1263 | 295 | 1025-1233: |
| family | | H3K9, | H1K25me1 | | | (Tachibana) | | preSET, |
| | | H3K27 | | | | | | SET, |
| | | | | | | | | postSET |
| SUV39 | SUV39H1 | — | H3K9me2/3 | H. sapiens | 412 | 79-412 | 334 | 172-412: |
| | | | | | | (Snowden) | | preSET, |
| | | | | | | | | SET, |
| | | | | | | | | postSET |
| Suvar3-9 | dim-5 | — | H3K9me3 | N. crassa | 331 | 1-331 | 331 | 77-331: |
| | | | | | | (Rathert) | | preSET, |
| | | | | | | | | SET, |
| | | | | | | | | postSET |
| Suvar3-9 | KYP | — | H3K9me1/2 | A. thaliana | 624 | 335-601 | 267 | — |
| (SUVH | | | | | | | (Jackson) | |
| subfamily) | | | | | | | | |
| Suvar3-9 | SUVR4 | H3K9me1 | H3K9me2/3 | A. thaliana | 492 | 180-492 | 313 | 192-462: |
| (SUVR | | | | | | | (Thorstensen) | preSET, |
| subfamily) | | | | | | | | SET, |
| | | | | | | | | postSET |
| Suvar4-20 | SET4 | — | H4K20me3 | C. elegans | 288 | 1-288 | 288 | — |
| | | | | | | (Vielle) | | |
| SET8 | SET1 | — | H4K20me1 | C. elegans | 242 | 1-242 | 242 | — |
| | | | | | | (Vielle) | | |
| SET8 | SETD8 | — | H4K20me1 | H. sapiens | 393 | 185-393 | 209 | 256-382: |
| | | | | | | | (Couture) | SET |
| SET8 | TgSET8 | — | H4K20me1/2/3 | T. gondii | 1893 | 1590-1893 | 304 | 1749-1884: |
| | | | | | | (Sautel) | | SET |

[0825] In some embodiment, the functional domain may be a Histone Methyltransferase (HMT) Recruiter Effector Domain. Preferred examples include those in the Table below, namely Hp1a, PHF19, and NIPP1.

### Table of Histone Methyltransferase (HMT) Recruiter Effector Domains

| | | | | | Full | Selected | Final | |
|---|---|---|---|---|---|---|---|---|
| Subtype/ | | Substrate | Modification | | size | truncation | size | Catalytic |
| Complex | Name | (if known) | (if known) | Organism | (aa) | (aa) | (aa) | domain |
| — | Hp1a | — | H3K9me3 | M. musculus | 191 | 73-191 | 119 | 121-179: |
| | | | | | | | (Hathaway) | chromoshadow |
| — | PHF19 | — | H3K27me3 | H. sapiens | 580 | (1-250) + | 335 | 163-250: |
| | | | | | | GGSG linker | (Ballaré) | PHD2 |
| | | | | | | (SEQ ID NO: 49) + | | |
| | | | | | | (500-580) | | |
| — | NIPP1 | — | H3K27me3 | H. sapiens | 351 | 1-329 | 329 | 310-329: |
| | | | | | | (Jin) | | EED |

[0827] In some embodiment, the functional domain may be Histone Acetyltransferase Inhibitor Effector Domain, Preferred examples include SET/TAF-1β listed in the Table below.

### Table of Histone Acetyltransferase Inhibitor Effector Domains

| | | | | | Full | Selected | Final | |
|---|---|---|---|---|---|---|---|---|
| Subtype/ | | Substrate | Modification | | size | truncation | size | Catalytic |
| Complex | Name | (if known) | (if known) | Organism | (aa) | (aa) | (aa) | domain |
| — | SET/TAF-1β | — | — | M. musculus | 289 | 1-289 | 289 | — |
| | | | | | | (Cervoni) | | |

[0829] It is also preferred to target endogenous (regulatory) control elements such as involved in translation, stability, or where applicable (enhancers and silencers) in addition to a promoter or promoter-proximal elements. Thus, the invention can also be used to target endogenous control elements (including enhancers and silencers) in addition to targeting of the promoter. These control elements can be located upstream and downstream of the transcriptional start site (TSS), starting from 200 bp from the TSS to 100 kb away. Targeting of known control elements can be used to activate or repress the gene of interest. In some cases, a single control element can influence the transcription of multiple target genes. Targeting of a single control element could therefore be used to control the transcription of multiple genes simultaneously,

[0830] Targeting of putative control elements on the other hand (e.g. by tiling the region of the putative control element as well as 200 bp up to 100 kB around the element) can be used as a means to verify such elements (by measuring the transcription of the gene of interest) or to detect novel control elements (e.g. by tiling 100 kb upstream and downstream of the TSS of the gene of interest). In addition, targeting of putative control elements can be useful in the context of understanding genetic causes of disease. Many mutations and common SNP variants associated with disease phenotypes are located outside coding regions. Targeting of such regions with either the activation or repression systems described herein can be followed by readout of transcription of either a) a set of putative targets (e.g. a set of genes located in closest proximity to the control element) or b) whole-transcriptome readout by e.g. RNAseq or microarray. This would allow for the identification of likely candidate genes involved in the disease phenotype. Such candidate genes could be useful as novel drug targets.

[0831] Histone acetyltransferase (HAT) inhibitors are mentioned herein. However, an alternative in some embodiments is for the one or more functional domains to comprise an acetyltransferase, preferably a histone acetyltransferase. These are useful in the field of epigenomics, for example in methods of interrogating the epigenome. Methods of interrogating the epigenome may include, for example, targeting epigenomic sequences. Targeting epigenomic sequences may include the guide being directed to an epigenomic target sequence. Epigenomic target sequence may include, in some embodiments, include a promoter, silencer or an enhancer sequence.

[0832] Use of a functional domain linked to a C2c2 effector protein as described herein, preferably a dead-C2c2 effector protein, more preferably a dead-FnC2c2 effector protein, to target epigenomic sequences can be used to activate or repress promoters, silencer or enhancers.

[0833] Examples of acetyltransferases are known but may include, in some embodiments, histone acetyltransferases. In some embodiments, the histone acetyltransferase may comprise the catalytic core of the human acetyltransferase p300 (Gerbasch & Reddy, Nature Biotech 6 Apr. 2015).

[0834] In some preferred embodiments, the functional domain is linked to a dead-C2c2 effector protein to target and activate epigenomic sequences such as promoters or enhancers. One or more guides directed to such promoters or enhancers may also be provided to direct the binding of the CRISPR enzyme to such promoters or enhancers.

[0835] In certain embodiments, the RNA targeting effector protein of the invention can be used to interfere with co-transcriptional modifications of DNA/chromatin structure, RNA-directed DNA methylation, or RNA-directed silencing/activation of DNA/chromatin, RNA-directed DNA methylation (RdDM) is an epigenetic process first discovered in plants. During RdDM, double-stranded RNAs (dsRNAs) are processed to 21-24 nucleotide small interfering RNAs (siRNAs) and guide methylation of homologous DNA loci. Besides RNA molecules, a plethora of proteins are involved in the establishment of RdDM, like Argonautes, DNA methyltransferases, chromatin remodelling complexes and the plant-specific PoUV and PolV. All these act in concert to add a methyl-group at the 5′ position of cytosines. Small RNAs can modify the chromatin structure and silence transcription by guiding Argonaute-containing complexes to complementary nascent (non-coding) RNA trancripts. Subsequently the recruitment of chromatin-modifying complexes, including hi stone and DNA methyltransferases, is mediated. The RNA targeting effector protein of the invention may be used to target such small RNAs and interfere in interactions between these small RNAs and the nascent non-coding transcripts.

[0836] The term “associated with” is used here in relation to the association of the functional domain to the C2c2 effector protein or the adaptor protein. It is used in respect of how one molecule ‘associates’ with respect to another, for example between an adaptor protein and a functional domain, or between the C2c2 effector protein and a functional domain. In the case of such protein-protein interactions, this association may be viewed in terms of recognition in the way an antibody recognizes an epitope. Alternatively, one protein may be associated with another protein via a fusion of the two, for instance one subunit being fused to another subunit. Fusion typically occurs by addition of the amino acid sequence of one to that of the other, for instance via splicing together of the nucleotide sequences that encode each protein or subunit. Alternatively, this may essentially be viewed as binding between two molecules or direct linkage, such as a fusion protein. In any event, the fusion protein may include a linker between the two subunits of interest (i.e. between the enzyme and the functional domain or between the adaptor protein and the functional domain). Thus, in some embodiments, the C2c2 effector protein or adaptor protein is associated with a functional domain by binding thereto. In other embodiments, the C2c2 effector protein or adaptor protein is associated with a functional domain because the two are fused together, optionally via an intermediate linker.

### Saturating Mutagenesis

[0837] The C2c2 effector protein system(s) described herein can be used to perform saturating or deep scanning mutagenesis of genomic loci in conjunction with a cellular phenotype—for instance, for determining critical minimal features and discrete vulnerabilities of functional elements required for gene expression, drug resistance, and reversal of disease. By saturating or deep scanning mutagenesis is meant that every or essentially every DNA base is cut within the genomic loci. A library of C2c2 effector protein guide RNAs may be introduced into a population of cells. The library may be introduced, such that each cell receives a single guide RNA (sgRNA). In the case where the library is introduced by transduction of a viral vector, as described herein, a low multiplicity of infection (MOI) is used. The library may include sgRNAs targeting every sequence upstream of a (protospacer adjacent motif) (PAM) sequence in a genomic locus. The library may include at least 100 non-overlapping genomic sequences upstream of a PAM sequence for every 1000 base pairs within the genomic locus. The library may include sgRNAs targeting sequences upstream of at least one different PAM sequence. The C2c2 effector protein systems may include more than one C2c2 protein. Any C2c2 effector protein as described herein, including orthologues or engineered C2c2 effector proteins that recognize different PAM sequences may be used. The frequency of off target sites for a sgRNA may be less than 500. Off target scores may be generated to select sgRNAs with the lowest off target sites. Any phenotype determined to be associated with cutting at a sgRNA target site may be confirmed by using sgRNAs targeting the same site in a single experiment. Validation of a target site may also be performed by using a modified C2c2 effector protein, as described herein, and two sgRNAs targeting the genomic site of interest. Not being bound by a theory, a target site is a true hit if the change in phenotype is observed in validation experiments.

[0838] With respect to the DNA-targeting proteins disclosed herein, the genomic loci may include at least one continuous genomic region. The at least one continuous genomic region may comprise up to the entire genome. The at least one continuous genomic region may comprise a functional element of the genome. The functional element may be within a non-coding region, coding gene, intronic region, promoter, or enhancer. The at least one continuous genomic region may comprise at least 1 kb, preferably at least 50 kb of genomic DNA. The at least one continuous genomic region may comprise a transcription factor binding site. The at least one continuous genomic region may comprise a region of DNase I hypersensitivity. The at least one continuous genomic region may comprise a transcription enhancer or repressor element. The at least one continuous genomic region may comprise a site enriched for an epigenetic signature. The at least one continuous genomic DNA region may comprise an epigenetic insulator. The at least one continuous genomic region may comprise two or more continuous genomic regions that physically interact. Genomic regions that interact may be determined by ‘4C technology’. 4C technology allows the screening of the entire genome in an unbiased manner for DNA segments that physically interact with a DNA fragment of choice, as is described in Zhao et al. ((2006) Nat Genet 38, 1341-7) and in U.S. Pat. No. 8,642,295, both incorporated herein by reference in its entirety. The epigenetic signature may be histone acetylation, histone methylation, histone ubiquitination, histone phosphorylation, DNA methylation, or a lack thereof.

[0839] The C2c2 effector protein system(s) for saturating or deep scanning mutagenesis can be used in a population of cells. The C2c2 effector protein system(s) can be used in eukaryotic cells, including but not limited to mammalian and plant cells. The population of cells may be prokaryotic cells. The population of eukaryotic cells may be a population of embryonic stem (ES) cells, neuronal cells, epithelial cells, immune cells, endocrine cells, muscle cells, erythrocytes, lymphocytes, plant cells, or yeast cells.

[0840] In one aspect, the present invention provides for a method of screening for functional elements associated with a change in a phenotype. The library may be introduced into a population of cells that are adapted to contain a C2c2 effector protein. The cells may be sorted into at least two groups based on the phenotype. The phenotype may be expression of a gene, cell growth, or cell viability. The relative representation of the guide RNAs present in each group are determined, whereby genomic sites associated with the change in phenotype are determined by the representation of guide RNAs present in each group. The change in phenotype may be a change in expression of a gene of interest. The gene of interest may be upregulated, downregulated, or knocked out. The cells may be sorted into a high expression group and a low expression group. The population of cells may include a reporter construct that is used to determine the phenotype. The reporter construct may include a detectable marker. Cells may be sorted by use of the detectable marker.

[0841] In another aspect, the present invention provides for a method of screening for genomic sites associated with resistance to a chemical compound. The chemical compound may be a drug or pesticide. The library may be introduced into a population of cells that are adapted to contain a C2c2 effector protein, wherein each cell of the population contains no more than one guide RNA; the population of cells are treated with the chemical compound; and the representation of guide RNAs are determined after treatment with the chemical compound at a later time point as compared to an early time point, whereby genomic sites associated with resistance to the chemical compound are determined by enrichment of guide RNAs. Representation of sgRNAs may be determined by deep sequencing methods.

[0842] Useful in the practice of the instant invention utilizing C2c2effector protein complexes are methods used in CRISPR-Cas9 systems and reference is made to the article entitled BCL11A enhancer dissection by Cas9-mediated in situ saturating mutagenesis. Canver, M. C., Smith, E. C., Sher, F., Pinello, L., Sanjana, N. E., Shalem, O., Chen, D. D., Schupp, P. G., Vinjamur, D. S., Garcia, S. P., Luc, S., Kurita, R., Nakamura, Y., Fujiwara, Y., Maeda, T., Yuan, G., Zhang, F., Orkin, S. H., & Bauer, D. E. DOI:10.1038/nature15521, published online Sep. 16, 2015, the article is herein incorporated by reference and discussed briefly below:

[0843] Canver et al. involves novel pooled CRISPR-Cas9 guide RNA libraries to perform in situ saturating mutagenesis of the human and mouse BCH11A erythroid enhancers previously identified as an enhancer associated with fetal hemoglobin (HbF) level and whose mouse ortholog is necessary for erythroid BCL11A expression. This approach revealed critical minimal features and discrete vulnerabilities of these enhancers. Through editing of primary human progenitors and mouse transgenesis, the authors validated the BCL11A erythroid enhancer as a target for HbF reinduction. The authors generated a detailed enhancer map that informs therapeutic genome editing.

### Method of Using C2c2 Systems to Modify a Cell or Organism

[0844] The invention in some embodiments comprehends a method of modifying a cell or organism. The cell may be a prokaryotic cell or a eukaryotic cell. The cell may be a mammalian cell. The mammalian cell many be a non-human primate, bovine, porcine, rodent or mouse cell. The cell may be a non-mammalian eukaryotic cell such as poultry, fish or shrimp. The cell may also be a plant cell. The plant cell may be of a crop plant such as cassava, corn, sorghum, wheat, or rice. The plant cell may also be of an algae, tree or vegetable. The modification introduced to the cell by the present invention may be such that the cell and progeny of the cell are altered for improved production of biologic products such as an antibody, starch, alcohol or other desired cellular output. The modification introduced to the cell by the present invention may be such that the cell and progeny of the cell include an alteration that changes the biologic product produced.

[0845] The system may comprise one or more different vectors. In an aspect of the invention, the effector protein is codon optimized for expression the desired cell type, preferentially a eukaryotic cell, preferably a mammalian cell or a human cell.

[0846] Packaging cells are typically used to form virus particles that are capable of infecting a host cell. Such cells include 293 cells, which package adenovirus, and ψ2 cells or PA317 cells, which package retrovirus. Viral vectors used in gene therapy are usually generated by producing a cell line that packages a nucleic acid vector into a viral particle. The vectors typically contain the minimal viral sequences required for packaging and subsequent integration into a host, other viral sequences being replaced by an expression cassette for the polynudeotide(s) to be expressed. The missing viral functions are typically supplied in trans by the packaging cell line. For example, AAV vectors used in gene therapy typically only possess ITR sequences from the AAV genome which are required for packaging and integration into the host genome. Viral DNA is packaged in a cell line, which contains a helper plasmid encoding the other AAV genes, namely rep and cap, but lacking ITR sequences. The cell line may also be infected with adenovirus as a helper. The helper virus promotes replication of the AAV vector and expression of AAV genes from the helper plasmid. The helper plasmid is not packaged in significant amounts due to a lack of ITR sequences. Contamination with adenovirus can be reduced by, e.g., heat treatment to which adenovirus is more sensitive than AAV. Additional methods for the delivery of nucleic acids to cells are known to those skilled in the art. See, for example, US20030087817, incorporated herein by reference.

[0847] In some embodiments, a host cell is transiently or non-transiently transfected with one or more vectors described herein. In some embodiments, a cell is transfected as it naturally occurs in a subject. In some embodiments, a cell that is transfected is taken from a subject. In some embodiments, the cell is derived from cells taken from a subject, such as a cell line. A wide variety of cell lines for tissue culture are known in the art. Examples of cell lines include, but are not limited to, C8161, CCRF-CEM, MOLT, mIMCD-3, NHDF, HeLa-S3, Huh1, Huh4, Huh7, HUVEC, HASMC, HEKn, HEKa, MiaPaCell, Panc1, PC-3, TF1, CTLL-2, C1R, Rat6, CV1, RPTE, A10, T24, J82, A375, ARH-77, Calu1, SW480, SW620, SKOV3, SK-UT, CaCo2, P388D1, SEM-K2, WEHI-231, HB56, TIB55, Jurkat, J45,01, LRMB, Bcl-1, BC-3, IC21, DLD2, Raw264.7, NRK, NRK-52E, MRC5, MEF, Hep G2, HeLa B, HeLa T4, COS, COS-1, COS-6, COS-M6A, BS-C-1 monkey kidney epithelial, BALB/3T3 mouse embryo fibroblast, 3T3 Swiss, 3T3-L1, 132-d5 human fetal fibroblasts; 10.1 mouse fibroblasts, 293-T, 3T3, 721, 9L, A2780, A2780ADR, A2780cis, A172, A20, A253, A431, A-549, ALC, B16, B35, BCP-1 cells, BEAS-2B, bEnd.3, BHK-21, BR 293, BxPC3, C3H-10T1/2, C6/36, Cal-27, CHO, CHO-7, CHO-IR, CHO-K1, CHO-K2, CHO-T, CHO Dhfr −/−, COR-L23, COR-L23/CPR, COR-L23/5010, COR-L23/R23, COS-7, COV-434, CML T1, CMT, CT26, D17, DH82, DU145, DuCaP, EL4, EM2, EM3, EMT6/AR1, EMT6/AR10.0, FM3, H1299, H69, HB54, HB55, HCA2, HEK-293, HeLa, Hepa1c1c7, HL-60, HMEC, HT-29, Jurkat, JY cells, K562 cells, Ku812, KCL22, KG1, KYO1, LNCap, Ma-Mel 1-48, MC-38, MCF-7, MCF-10A, MDA-MB-231, MDA-MB-468, MDA-MB-435, MDCK II, MDCK II, MOR/0.2R, MONO-MAC 6, MTD-1A, MyEnd, NCI-H69/CPR, NCI-H69/LX10, NCI-H69/LX20, NCI-H69/LX4, NIH-3T3, NALM-1, NW-145, OPCN/OPCT cell lines, Peer, PNT-1A/PNT 2, RenCa, RIN-5F, RMA/RMAS, Saos-2 cells, St-9, SkBr3, T2, T-47D, T84, THP1 cell line, U373, U87, U937, VCaP, Vero cells, WM39, WT-49, X63, YAC-1, YAR, and transgenic varieties thereof. Cell lines are available from a variety of sources known to those with skill in the art (see, e.g., the American Type Culture Collection (ATCC) (Manassus, Va.)). In some embodiments, a cell transfected with one or more vectors described herein is used to establish a new cell line comprising one or more vector-derived sequences. In some embodiments, a cell transiently transfected with the components of a nucleic acid-targeting system as described herein (such as by transient transfection of one or more vectors, or transfection with RNA), and modified through the activity of a nucleic acid-targeting complex, is used to establish a new cell line comprising cells containing the modification but lacking any other exogenous sequence. In some embodiments, cells transiently or non-transiently transfected with one or more vectors described herein, or cell lines derived from such cells are used in assessing one or more test compounds.

[0848] In some embodiments, one or more vectors described herein are used to produce a non-human transgenic animal or transgenic plant. In some embodiments, the transgenic animal is a mammal, such as a mouse, rat, or rabbit. In certain embodiments, the organism or subject is a plant. In certain embodiments, the organism or subject or plant is algae. Methods for producing transgenic plants and animals are known in the art, and generally begin with a method of cell transfection, such as described herein.

[0849] In one aspect, the invention provides for methods of modifying a target polynucleotide in a eukaryotic cell. In some embodiments, the method comprises allowing a nucleic acid-targeting complex to bind to the target polynucleotide to effect cleavage of said target polynucleotide thereby modifying the target polynucleotide, wherein the nucleic acid-targeting complex comprises a nucleic acid-targeting effector protein complexed with a guide RNA hybridized to a target sequence within said target polynucleotide.

[0850] In one aspect, the invention provides a method of modifying expression of a polynucleotide in a eukaryotic cell. In some embodiments, the method comprises allowing a nucleic acid-targeting complex to bind to the polynucleotide such that said binding results in increased or decreased expression of said polynucleotide; wherein the nucleic acid-targeting complex comprises a nucleic acid-targeting effector protein complexed with a guide RNA hybridized to a target sequence within said polynucleotide.

### C2c2 !Effector Protein Complexes Can Be Used in Plants

[0851] The C2c2 effector protein system(s) (e.g., single or multiplexed) can be used in conjunction with recent advances in crop genomics. The systems described herein can be used to perform efficient and cost effective plant gene or genome interrogation or editing or manipulation—for instance, for rapid investigation and/or selection and/or interrogations and/or comparison and/or manipulations and/or transformation of plant genes or genomes; e.g., to create, identify, develop, optimize, or confer trait(s) or characteristic(s) to plant(s) or to transform a plant genome. There can accordingly be improved production of plants, new plants with new combinations of traits or characteristics or new plants with enhanced traits, The C2c2 effector protein system(s) can be used with regard to plants in Site-Directed Integration (SDI) or Gene Editing (GE) or any Near Reverse Breeding (NRB) or Reverse Breeding (RB) techniques. Aspects of utilizing the herein described C2c2 effector protein systems may be analogous to the use of the CRISPR-Cas (e.g. CRISPR-Cas9) system in plants, and mention is made of the University of Arizona website “CRISPR-PLANT” (www. genome.arizona.edu/crispr/) (supported by Penn State and AGI). Embodiments of the invention can be used in genome editing in plants or where RNAi or similar genome editing techniques have been used previously; see, e.g., Nekrasov, “Plant genome editing made easy: targeted mutagenesis in model and crop plants using the CRISPR-Cas system,” Plant Methods 2013, 9:39 (doi:10.1186/1746-4811-9-39); Brooks, “Efficient gene editing in tomato in the first generation using the CRISPR-Cas9 system,” Plant Physiology September 2014 pp 114.247577; Shan, “Targeted genome modification of crop plants using a CRISPR-Cas system,” Nature Biotechnology 31, 686-688 (2013); Feng, “Efficient genome editing in plants using a CRISPR/Cas system,” Cell Research (2013) 23:1229-1232. doi:10.1038/cr.2013.114; published online 20 Aug. 2013; Xie, “RNA-guided genome editing in plants using a CRISPR-Cas system,” Mol Plant. 2013 November; 6(6):1975-83. doi: 10.1093/mp/sst119. Epub 2013 Aug. 17; Xu, “Gene targeting using the Agrobacterium tumefaciens-mediated. CRISPR-Cas system in rice,” Rice 2014, 7:5 (2014), Zhou et al., “Exploiting SNP's for biallelic CRISPR mutations in the outcrossing woody perennial Populus reveals 4-coumarate: CoA ligase specificity and Redundancy,” New Phytologist (2015) (Forum) 1-4 (available online only at www.newphytologist.com); Caliando et al, “Targeted DNA degradation using a CRISPR device stably carried in the host genome, NATURE COMMUNICATIONS 6:6989, DOI: 10.1038/ncomms7989, www.nature.com/naturecommunications DOI: 10.1038/ncomms7989; U.S. Pat. No. 6,603,061—Agrobacterium-Mediated Plant Transformation Method; U.S. Pat. No. 7,868,149—Plant Genome Sequences and Uses Thereof and US 2009/0100536—Transgenic Plants with Enhanced Agronomic Traits, all the contents and disclosure of each of which are herein incorporated by reference in their entirety. In the practice of the invention, the contents and disclosure of Morrell et al “Crop genomics: advances and applications,” Nat Rev Genet. 2011 Dec. 29; 13(2):85-96; each of which is incorporated by reference herein including as to how herein embodiments may be used as to plants. Accordingly, reference herein to animal cells may also apply, mutatis mutandis, to plant cells unless otherwise apparent; and, the enzymes herein having reduced off-target effects and systems employing such enzymes can be used in plant applciations, including those mentioned herein.

[0852] Sugano et al. (Plant Cell Physiol. 2014 March; 55(3):475-81, doi: 10.1093/pcp/pcu014. Epub 2014 January 18) reports the application of CRISPR-Cas9 to targeted mutagenesis in the liverwort Marchantia polymorpha L., which has emerged as a model species for studying land plant evolution. The U6 promoter of M, polymorpha was identified and cloned to express the gRNA. The target sequence of the gRNA was designed to disrupt the gene encoding auxin response factor 1 (ARF1) in M. polymorpha. Using Agrobacterium-mediated transformation, Sugano et al, isolated stable mutants in the gametophyte generation of M. polymorpha. CRISPR-Cas9-based site-directed mutagenesis in vivo was achieved using either the Cauliflower mosaic virus 355 or M. polymorpha EF1α promoter to express Cas9. Isolated mutant individuals showing an auxin-resistant phenotype were not chimeric. Moreover, stable mutants were produced by asexual reproduction of T1 plants. Multiple aril alleles were easily established using CRIPSR/Cas9-based targeted mutagenesis. The C2c2 systems of the present invention can be used to regulate the same as well as other genes, and like expression control system such as RNAi and siRNA, the method of the invention can be inducible and reversible.

[0853] Kabadi et al. (Nucleic Acids Res. 2014 Oct. 29; 42(19):e147. doi: 10.1093/nar/gku749. Epub 2014 Aug. 13) developed a single lentiviral system to express a Cas9 variant, a reporter gene and up to four sgRNAs from independent RNA polymerase III promoters that are incorporated into the vector by a convenient Golden Gate cloning method. Each sgRNA was efficiently expressed and can mediate multiplex gene editing and sustained transcriptional activation in immortalized and primary human cells, The instant invention can be used to regulate the plant genes of Kabadi.

[0854] Xing et al. (BMC Plant Biology 2014, 14:327) developed a CRISPR-Ca.s9 binary vector set based on the pGreen or pCAMBIA backbone, as well as a gRNA. This toolkit requires no restriction enzymes besides Bsal to generate final constructs harboring maize-codon optimized Cas9 and one or more gRNAs with high efficiency in as little as one cloning step. The toolkit was validated using maize protoplasts, transgenic maize lines, and transgenic Arabidopsis lines and was shown to exhibit high efficiency and specificity. More importantly, using this toolkit, targeted mutations of three Arabidopsis genes were detected in transgenic seedlings of the T1 generation. Moreover, the multiple-gene mutations could be inherited by the next generation. (guide RNA)module vector set, as a toolkit for multiplex genome editing in plants. The C2c2 systems and proteins of the instant invention may be used to target the genes targeted by Xing.

[0855] The C2c2 CRISPR systems of the invention may be used in the detection of plant viruses. Gambino et al. (Phytopathology. 2006 November; 96(11):1223-9. doi: 10.1094/PHYTO-96-1223) relied on amplification and multiplex PCR for simultaneous detection of nine grapevine viruses. The C2c2 systems and proteins of the instant invention may similarly be used to detect multiple targets in a host. Moreover, the systems of the invention can be used to simultaneously knock down viral gene expression in valuable cultivars, and prevent activation or further infection by targeting expressed vial RNA,

[0856] Murray et al. (Prot Biol Sci. 2013 Jun. 26; 280(1765):20130965. doi: 10.1098/rspb.2013.0965; published 2013 Aug. 22) analyzxed 12 plant RNA viruses to investigatge evoluationary rates and found evidence of episodic selection possibly due to shifts between different host genotyopes or species. The C2c2 systems and proteins of the instant invention may be used to tarteg or immunize against such viruses in a host. For example, the systems of the invention can be used to block viral RNA expression hence replication. Also, the invention can be used to target nuclic acids for cleavage as wil as to target expression or activation. Moreover, the systems of the invention can be multiplexed so as to hit multiple targets or multiple isolate of the same virus.

[0857] Ma et al. (Mol Plant. 2015 Aug. 3; 8(8):1274-84. doi: 10.1016/j.molp.2015.04.007) reports robust CRISPR-Cas9 vector system, utilizing a plant codon optimized Cas9 gene, for convenient and high-efficiency multiplex genome editing in monocot and dicot plants. Ma et al. designed PCR-based procedures to rapidly generate multiple sgRNA expression cassettes, which can be assembled into the binary CRISPR-Cas9 vectors in one round of cloning by Golden Gate ligation or Gibson Assembly. With this system, Ma et al. edited 46 target sites in rice with an average 85.4% rate of mutation, mostly in biallelic and homozygous status. Ma et al. provide examples of loss-of-function gene mutations in T0 rice and. T1 Arabidopsis plants by simultaneous targeting of multiple (up to eight) members of a gene family, multiple genes in a biosynthetic pathway, or multiple sites in a single gene. Similarly, the C2c2 systems of the instant invention can dffieicnelty target expression of multiple genes simultaneously.

[0858] Lowder et al. (Plant Physiol. 2015 Aug. 21. pii: pp.00636.2015) also developed a CRISPR-Cas9 toolbox enables multiplex genome editing and transcriptional regulation of expressed, silenced or non-coding genes in plants. This toolbox provides researchers with a protocol and reagents to quickly and efficiently assemble functional CRISPR-Cas9 T-DNA constructs for monocots and dicots using Golden Gate and Gateway cloning methods. it comes with a full suite of capabilities, including multiplexed gene editing and transcriptional activation or repression of plant endogenous genes. T-DNA based transformation technology is fundamental to modern plant biotechnology, genetics, molecular biology and physiology. As such, we developed a method for the assembly of Cas9 (WT, nickase or dCas9) and gRNA(s) into a T-DNA destination-vector of interest. The assembly method is based on both Golden Gate assembly and MultiSite Gateway recombination. Three modules are required for assembly. The first module is a Cas9 entry vector, which contains promoterless Cas9 or its derivative genes flanked by attL1 and attR5 sites. The second module is a gRNA entry vector which contains entry gRNA expression cassettes flanked by attL5 and attL2 sites. The third module includes attR1-attR2-containing destination T-DNA vectors that provide promoters of choice for Cas9 expression. The toolbox of Lowder et al. may be applied to the C2c2 effector protein system of the present invention.

[0859] Organisms such as yeast and microalgae are widely used for synthetic biology. Stovicek et al. (Metab. Eng. Comm., 2015; 2:13 describes genome editing of industrial yeast, for example, Saccharomyces cerevisae, to efficiently produce robust strains for industrial production. Stovicek used a CRISPR-Cas9 system codon-optimized for yeast to simultaneously disrupt both alleles of an endogenous gene and knock in a heterologous gene. Cas9 and gRNA were expressed from genomic or episomal 2μ-based vector locations. The authors also showed that gene disruption efficiency could be improved by optimization of the levels of Cas9 and gRNA expression. Hlavová et al, (Biotechnol. Adv. 2015) discusses development of species or strains of microalgae using techniques such as CRISPR to target nuclear and chloroplast genes for insertional mutagenesis and screening. The same plasmids and vectors can be appliced to the C2c2 systems of the instant invention.

[0860] Petersen (“Towards precisely glycol engineered plants,” Plant Biotech Denmark Annual meeting 2015, Copenhagen, Denmark) developed a method of using CRISPR/Cas9 to engineer genome changes in Arabidopsis, for example to glyco engineer Arabidopsis for production of proteins and products having desired posttranslational modifications. Hebelstrup et al. (Front Plant Sci. 2015 Apr 23; 6:247) outlines in planta starch bioengineering, providing crops that express starch modifying enzymes and directly produce products that normally are made by industrial chemical and/or physical treatments of starches. The methods of Petersen and Hebel strup may be applied to the C2c2 effector protein system of the present invention.

[0861] Kurthe t al, J Virol. 2012 June;86(1.1):6002-9. doi: 11.0.1128/JVI.00436-12. Epub 2012 Mar. 21) developed an RNA virus-based vector for the introduction of desired traits into grapevine without heritable modifications to the genome. The vector provided the ability to regulate expression of of endogenous genes by virus-induced gene silencing. The C2c2 systems and proteins of the instant invention can be used to silence genes and proteins without heritable modification to the genome.

[0862] In an embodiment, the plant may be a legume. The present invention may utilize the herein disclosed CRISP-Cas system for exploring and modifying, for example, without limitation, soybeans, peas, and peanuts. Curtin et al. provides a toolbox for legume function genomics. (See Curtin et al., “A genome engineering toolbox for legume Functional genomics,” International Plant and Animal Genome Conference XXII 2014). Curtin used the genetic transformation of CRISPR to knock-out/down single copy and duplicated legume genes both in hairy root and whole plant systems. Some of the target genes were chosen in order to explore and optimize the features of knock-out/down systems (e.g., phytoene desatura.se), while others were identified by soybean homology to Arabidopsis Dicer-like genes or by genome-wide association studies of nodulation in Medicago. The C2c2 systems and proteins of the instant invention can be used to knockout/knockdown systems.

[0863] Peanut allergies and allergies to legumes generally are a real and serious health concern. The C2c2 effector protein system of the present invention can be used to identify and then edit or silence genes encoding allergenic proteins of such legumes. Without limitation as to such genes and proteins, Nicolaou et al. identifies allergenic proteins in peanuts, soybeans, lentils, peas, lupin, green beans, and mung beans. See, Nicolaou et al., Current Opinion in Allergy and Clinical. Immunology 2011; 11(3):222).

[0864] In an advantageous embodiment, the plant may be a tree. The present invention may also utilize the herein disclosed CRISPR Cas system for herbaceous systems (see, e.g., Belhaj et al., Plant Methods 9: 39 and Harrison et al., Genes & Development 28: 1859-1872). In a particularly advantageous embodiment, the CRISPR Cas system of the present invention may target single nucleotide polymorphisms (SNPs) in trees (see, e.g., Zhou et al., New Phytologist, Volume 208, Issue 2, pages 298-301, October 2015). In the Zhou et al. study, the authors applied a CRISPR Cas system in the woody perennial Populus using the 4-coumarate:CoA ligase (400 gene family as a case study and achieved 100% mutational efficiency for two 4CL genes targeted, with every transformant examined carrying biallelic modifications. In the Zhou et al., study, the CRISPR-Cas9 system was highly sensitive to single nucleotide polymorphisms (SNPs), as cleavage for a third 4CL gene was abolished due to SNPs in the target sequence. These methods may be applied to the C2c2 effector protein system of the present invention.

[0865] The methods of Zhou et al. (New Phytologist, Volume 208, Issue 2, pages 298-301, October 2015) may be applied to the present invention as follows. Two 4CL genes, 4CL1 and 4CL2, associated with lignin and flavonoid biosynthesis, respectively are targeted for CRISPR-Cas9 editing. The Populus tremula×alba clone 717-1B4 routinely used for transformation is divergent from the genome-sequenced Populus trichocaipa. Therefore, the 4CL1 and 4CL2 gRNAs designed from the reference genome are interrogated with in-house 717 RNA-Seq data to ensure the absence of SNPs which could limit Cas efficiency. A third gRNA designed for 4CL5, a genome duplicate of 4CL1, is also included. The corresponding 717 sequence harbors one SNP in each allele near/within the PAM, both of which are expected to abolish targeting by the 4CL5-gRNA. All three gRNA target sites are located within the first exon. For 717 transformation, the gRNA is expressed from the Medicago U6.6 promoter, along with a human codon-optimized Cas under control of the CAMV 35S promoter in a binary vector. Transformation with the Cas-only vector can serve as a control. Randomly selected 4CL1 and 4CL2 lines are subjected to amplicon-sequencing. The data is then processed and biallelic mutations are confirmed in all cases. These methods may be applied to the C2c2 effector protein system of the present invention.

[0866] In plants, pathogens are often host-specific. For example, Fusarium oxysporum f. sp. lycopersici causes tomato wilt but attacks only tomato, and F. ovsporum f. dianthii Puccinia graminis f. sp. tritici attacks only wheat. Plants have existing and induced defenses to resist most pathogens. Mutations and recombination events across plant generations lead to genetic variability that gives rise to susceptibility, especially as pathogens reproduce with more frequency than plants. In plants there can be non-host resistance, e.g., the host and pathogen are incompatible. There can also be Horizontal Resistance, e.g., partial resistance against all races of a pathogen, typically controlled by many genes and Vertical Resistance, e.g., complete resistance to some races of a pathogen but not to other races, typically controlled by a few genes. In a Gene-for-Gene level, plants and pathogens evolve together, and the genetic changes in one balance changes in other. Accordingly, using Natural Variability, breeders combine most useful genes for Yield, Quality, Uniformity, Hardiness, Resistance. The sources of resistance genes include native or foreign Varieties, Heirloom Varieties, Wild Plant Relatives, and Induced Mutations, e.g., treating plant material with mutagenic agents. Using the present invention, plant breeders are provided with a new tool to induce mutations. Accordingly, one skilled in the art can analyze the genome of sources of resistance genes, and in Varieties having desired characteristics or traits employ the present invention to induce the rise of resistance genes, with more precision than previous mutagenic agents and hence accelerate and improve plant breeding programs.

[0867] Aside from the plants otherwise discussed herein and above, engineered plants modified by the effector protein and suitable guide, and progeny thereof, as provided. These may include disease or drought resistant crops, such as wheat, barley, rice, soybean or corn; plants modified to remove or reduce the ability to self-pollinate (but which can instead, optionally, hybridise instead); and allergenic foods such as peanuts and nuts where the immunogenic proteins have been disabled, destroyed or disrupted by targeting via a effector protein and suitable guide.

### Therapeutic Treatment

[0868] The system of the invention can he applied in areas of former RNA cutting technologies, without undue experimentation, from this disclosure, including therapeutic, assay and other applications, because the present application provides the foundation for informed engineering of the system. The present invention provides for therapeutic treatment of a disease caused by overexpression of RNA, toxic RNA and/or mutated RNA (such as, for example, splicing defects or truncations). Expression of the toxic RNA may be associated with formation of nuclear inclusions and late-onset degenerative changes in brain, heart or skeletal muscle. In the best studied example, myotonic dystrophy, it appears that the main pathogenic effect of the toxic RNA is to sequester binding proteins and compromise the regulation of alternative splicing (Hum. Mol. Genet. (2006) 15 (suppl 2): R162-R169). Myotonic dystrophy [dystrophia myotonica (DM)] is of particular interest to geneticists because it produces an extremely wide range of clinical features. A partial listing would include muscle wasting, cataracts, insulin resistance, testicular atrophy, slowing of cardiac conduction, cutaneous tumors and effects on cognition. The classical thrtn of DM, which is now called DM type 1 (DM1), is caused by an expansion of CTG repeats in the 3′-untranslated region (UTR) of DMPK, a gene encoding a cytosolic protein kinase.

[0869] The below table presents a list of exons shown to have misregulated alternative splicing in DM1 skeletal muscle, heart or brain.

| Tissue/gene Target | | Reference |
|---|---|---|
| Skeletal muscle | | |
| ALP | ex 5a, 5b | Lin X., et al. Failure of MBNL1-dependent postnatal splicing |
| | | transitions in myotonic dystrophy. Hum. Mol. Genet 2006; 15: 2087-2097 |
| CAPN3 | ex 16 | Lin X., et al. Failure of MBNL1-dependent postnatal splicing |
| | | transitions in myotonic dystrophy. Hum. Mol. Genet 2006; 15: 2087-2097 |
| CLCN1 | int 2, ex 7a, 8a | Mankodi A., et al. Expanded CUG repeats trigger aberrant splicing |
| | | of ClC-1 chloride channel pre-mRNA and hyperexcitability of |
| | | skeletal muscle in myotonic dystrophy. Mol. Cell 2002; 10: 35-44 |
| | | Charlet-B N., et al. Loss of the muscle-specific chloride channel in |
| | | type 1 myotonic dystrophy due to misregulated alternative splicing. |
| | | Mol. Cell 2002; 10: 45-53 |
| FHOS | ex 11a | Lin X., et al. Failure of MBNL1-dependent postnatal splicing |
| | | transitions in myotonic dystrophy. Hum. Mol. Genet 2006; 15: 2087-2097 |
| GFAT1 | ex 10 | Lin X., et al. Failure of MBNL1-dependent postnatal splicing |
| | | transitions in myotonic dystrophy. Hum. Mol. Genet 2006; 15: 2087-2097 |
| IR | ex 11 | Savkur R.S., et al. Aberrant regulation of insulin receptor alternative |
| | | splicing is associated with insulin resistance in myotonic dystrophy. |
| | | Nat. Genet. 2001; 29: 40-47 |
| MBNL1 | ex 7 | Lin X., et al. Failure of MBNL1-dependent postnatal splicing |
| | | transitions in myotonic dystrophy. Hum. Mol. Genet 2006; 15: 2087-2097 |
| MBNL2 | ex 7 | Lin X., et al. Failure of MBNL1-dependent postnatal splicing |
| | | transitions in myotonic dystrophy. Hum. Mol. Genet 2006; 15: 2087-2097 |
| MTMR1 | ex 2.1, 2.2 | Buj-Bello A., et al. Muscle-specific alternative splicing of |
| | | myotubularin-related 1 gene is impaired in DM1 muscle cells. Hum. |
| | | Mol. Genet. 2002; 11: 2297-2307 |
| NRAP | ex 12 | Lin X., et al. Failure of MBNL1-dependent postnatal splicing |
| | | transitions in myotonic dystrophy. Hum. Mol. Genet 2006; 15: 2087-2097 |
| RYR1 | ex 70 | Kimura T., et al. Altered mRNA splicing of the skeletal muscle |
| | | ryanodine receptor and sarcoplasmic/endoplasmic reticulum Ca2+- |
| | | ATPase in myotonic dystrophy type 1. Hum. Mol. Genet. |
| | | 2005; 14: 2189-2200 |
| SERCA1 | ex 22 | Kimura T., et al. Altered mRNA splicing of the skeletal muscle |
| | | ryanodine receptor and sarcoplasmic/endoplasmic reticulum Ca2+- |
| | | ATPase in myotonic dystrophy type 1. Hum. Mol. Genet. |
| | | 2005; 14: 2189-2200 |
| | | Lin X., et al. Failure of MBNL1-dependent postnatal splicing |
| | | transitions in myotonic dystrophy. Hum. Mol. Genet 2006; 15: 2087-2097 |
| z-Titin | ex Zr4, Zr5 | Lin X., et al. Failure of MBNL1-dependent postnatal splicing |
| | | transitions in myotonic dystrophy. Hum. Mol. Genet 2006; 15: 2087-2097 |
| m-Titin | M-line ex5 | Lin X., et al. Failure of MBNL1-dependent postnatal splicing |
| | | transitions in myotonic dystrophy. Hum. Mol. Genet 2006; 15: 2087-2097 |
| TNNT3 | fetal ex | Kanadia R.N., et al. A muscleblind knockout model for myotonic |
| | | dystrophy. Science 2003; 302: 1978-1980 |
| ZASP | ex 11 | Lin X., et al. Failure of MBNL1-dependent postnatal splicing |
| | | transitions in myotonic dystrophy. Hum. Mol. Genet 2006; 15: 2087-2097 |
| Heart | | |
| TNNT2 | ex 5 | Philips A.V., et al. Disruption of splicing regulated by a CUG- |
| | | binding protein in myotonic dystrophy. Science 1998; 280: 737-741 |
| ZASP | ex 11 | Mankodi A., et al. Nuclear RNA foci in the heart in myotonic |
| | | dystrophy. Circ. Res. 2005; 97: 1152-1155 |
| m-Titin | M-line ex 5 | Mankodi A., et al. Nuclear RNA foci in the heart in myotonic |
| | | dystrophy. Circ. Res. 2005; 97: 1152-1155 |
| KCNAB1 | ex 2 | Mankodi A., et al. Nuclear RNA foci in the heart in myotonic |
| | | dystrophy. Circ. Res. 2005; 97: 1152-1155 |
| ALP | ex 5 | (Mankodi A., et al. Nuclear RNA foci in the heart in myotonic |
| | | dystrophy. Circ. Res. 2005; 97: 1152-1155 |
| Brain | | |
| TAU | ex 2, ex 10 | Sergeant N., et al. Dysregulation of human brain microtubule- |
| | | associated tau mRNA maturation in myotonic dystrophy type 1. |
| | | Hum. Mol. Genet. 2001; 10: 2143-2155 |
| | | Jiang H., et al. Myotonic dystrophy type 1 associated with nuclear |
| | | foci of mutant RNA, sequestration of muscleblind proteins, and |
| | | deregulated alternative splicing in neurons. Hum. Mol. Genet. |
| | | 2004; 13: 3079-3088 |
| APP | ex 7 | Jiang H., et al. Myotonic dystrophy type 1 associated with nuclear |
| | | foci of mutant RNA, sequestration of muscleblind proteins, and |
| | | deregulated alternative splicing in neurons. Hum. Mol. Genet. |
| | | 2004; 13: 3079-3088 |
| NMDAR1 | ex 5 | Jiang H., et al. Myotonic dystrophy type 1 associated with nuclear |
| | | foci of mutant RNA, sequestration of muscleblind proteins, and |
| | | deregulated alternative splicing in neurons. Hum. Mol. Genet. |
| | | 2004; 13: 3079-3088 |

[0870] The enzymes of the present invention may target overexpressed RNA or toxic RNA, such as for example, the DMPK gene or any of the misregulated alternative splicing in DMI skeletal muscle, heart or brain in, for example, the above table.

[0871] The enzymes of the present invention may also target trans-acting mutations affecting RNA-dependent functions that cause disease (summarized in Cell. 2009 Feb. 20; 136(4): 777-793) as indicated in the below table.

| DISEASE | GENE/MUTATION | FUNCTION |
|---|---|---|
| Prader Willi syndrome | SNORD116 | ribosome biogenesis |
| Spinal muscular atrophy (SMA) | SMN2 | splicing |
| Dyskeratosis congenita (X-linked) | DKC1 | telomerase/translation |
| Dyskeratosis congenita (autosomal | TERC | telomerase |
| dominant) | | |
| Dyskeratosis congenita (autosomal | TERT | telomerase |
| dominant) | | |
| Diamond-Blackfan anemia | RPS19, RPS24 | ribosome biogenesis |
| Shwachman-Diamond syndrome | SBDS | ribosome biogenesis |
| Treacher-Collins syndrome | TCOF1 | ribosome biogenesis |
| Prostate cancer | SNHG5 | ribosome biogenesis |
| Myotonic dystrophy, type 1 (DM1) | DMPK (RNA gain-of- | protein kinase |
| | function) | |
| Myotonic dystrophy type 2 (DM2) | ZNF9 (RNA gain-of- | RNA binding |
| | function) | |
| Spinocerebellar ataxia 8 (SCA8) | ATXN8/ATXN8OS (RNA | unknown/noncoding |
| | gain-of-function) | RNA |
| Huntington's disease-like 2 (HDL2) | JPH3 (RNA gain-of- | ion channel function |
| | function) | |
| Fragile X-associated tremor ataxia | FMR1 (RNA gain-of- | translation/mRNA |
| syndrome (FXTAS) | function) | localization |
| Fragile X syndrome | FMR1 | translation/mRNA |
| | | localization |
| X-linked mental retardation | UPF3B | translation/nonsense |
| | | mediated decay |
| Oculopharyngeal muscular dystrophy | PABPN1 | 3′ end formation |
| (OPMD) | | |
| Human pigmentary genodermatosis | DSRAD | editing |
| Retinitis pigmentosa | PRPF31 | splicing |
| Retinitis pigmentosa | PRPF8 | splicing |
| Retinitis pigmentosa | HPRP3 | splicing |
| Retinitis pigmentosa | PAP1 | splicing |
| Cartilage-hair hypoplasia(recessive) | RMRP | splicing |
| Autism | 7q22-q33 locus breakpoint | noncoding RNA |
| Beckwith-Wiedemann syndrome | H19 | noncoding RNA |
| (BWS) | | |
| Charcot-Marie-Tooth (CMT) Disease | GRS | translation |
| Charcot-Marie-Tooth (CMT) Disease | YRS | translation |
| Amyotrophic lateral sclerosis (ALS) | TARDBP | splicing, transcription |
| Leukoencephalopathy with vanishing | EIF2B1 | translation |
| white matter | | |
| Wolcott-Rallison syndrome | EIF2AK3 | translation (protease) |
| Mitochondrial myopathy and | PUS1 | translation |
| sideroblastic anemia (MLASA) | | |
| Encephalomyopathy and hypertrophic | TSFM | translation |
| cardiomyopathy | | (mitochondrial) |
| Hereditary spastic paraplegia | SPG7 | ribosome biogenesis |
| Leukoencephalopathy | DARS2 | translation |
| | | (mitochondrial) |
| Susceptibility to diabetes mellitus | LARS2 | translation |
| | | (mitochondrial) |
| Deafness | MTRNR1 | ribosome biogenesis |
| | | (mitochondrial) |
| MELAS syndrome, deafness | MTRNR2 | ribosome biogenesis |
| | | (mitochondrial) |
| Cancer | SFRS1 | splicing, translation, |
| | | export |
| Cancer | RBM5 | splicing |
| Multiple disorders | mitochondrial tRNA | translation |
| | mutations | (mitochondrial) |
| Cancer | miR-17-92 cluster | RNA interference |
| Cancer | miR-372/miR-373 | RNA interference |

[0872] The enzyme of the present invention may also be used in the treatment of various tauopathies, including primary and secondary tauopathies, such as primary age-related tauopathy (PART)/Neurofibrillary tangle-predominant senile dementia, with NFTs similar to AD, but without plaques, dementia pugilistica (chronic traumatic encephalopathy), progressive supranuclear palsy, corticobasal degeneration, frontotemporal dementia and parkinsonism linked to chromosome 17, lytico-Bodig disease (Parkinson-dementia complex of Guam), ganglioglioma and gangliocytoma, meningioangiomatosis, postencephalitic parkinsonism, subacute sclerosing panencephalitis, as well as lead encephalopathy, tuberous sclerosis, Hallervorden-Spatz disease, and lipofuscinosis, alzheimers disease.The enzymes of the present invention may also target mutations disrupting the cis-acting splicing code cause splicing defects and disease (summarized in Cell, 2009 Feb. 20; 136(4): 777-793). The motor neuron degenerative disease SMA results from deletion of the SMN1 gene. The remaining SMN2 gene has a C→T substitution in exon 7 that inactivates an exonic splicing enhancer (ESE), and creates an exonic splicing silencer (ESS), leading to exon 7 skipping and a truncated protein (SMNΔ7). A T→A substitution in exon 31 of the dystrophin gene simultaneously creates a premature termination codon (STOP) and an ESS, leading to exon 31 skipping. This mutation causes a mild form of DMD because the mRNA lacking exon 31 produces a partially functional protein. Mutations within and downstream of exon 10 of the MAPT gene encoding the tau protein affect splicing regulatory elements and disrupt the normal 1:1 ratio of mRNAs including or excluding exon 10. This results in a perturbed balance between tau proteins containing either four or three microtubule-binding domains (4R-tau and 3R-tau, respectively), causing the neuropathological disorder FTDP-17. The example shown is the N279K mutation which enhances an ESE function promoting exon 10 inclusion and shifting the balance toward increased 4R-tau. Polymorphic (UG)m(U)n tracts within the 3′ splice site of the CFTR gene exon 9 influence the extent of exon 9 inclusion and the level of full-length functional protein, modifying the severity of cystic fibrosis (CF) caused by a mutation elsewhere in the CFTR gene.

[0873] The innate immune system detects viral infection primarily by recognizing viral nucleic acids inside an infected cell, referred to as DNA or RNA sensing. In vitro RNA sensing assays can be used to detect specific RNA substrates. The RNA targeting effector protein can for instance be used for RNA-based sensing in living cells. Examples of applications are diagnostics by sensing of, for examples, disease-specific RNAs.

[0874] The RNA targeting effector protein of the invention can further be used for antiviral activity, in particular against RNA viruses. The effector protein can be targeted to the viral RNA using a suitable guide RNA selective for a selected viral RNA sequence. In particular, the effector protein may be an active nuclease that cleaves RNA, such as single stranded RNA. provided is therefore the use of an RNA targeting effector protein of the invention as an antiviral agent.

[0875] Therapeutic dosages of the enzyme system of the present invention to target RNA the above-referenced RNAs are contemplated to be about 0.1 to about 2 mg/kg the dosages may be administered sequentially with a monitored response, and repeated dosages if necessary, up to about 7 to 10 doses per patient. Advantageously, samples are collected from each patient during the treatment regimen to ascertain the effectiveness of treatment. For example. RNA samples may be isolated and quantified to determine if expression is reduced or ameliorated. Such a diagnostic is within the purview of one of skill in the art.

[0876] With respect to general information on CRISPR-Cas Systems, mention is made of the following (also hereby incorporated herein by reference):
[0877] Multiplex genome engineering using CRISPR/Cas systems. Cong, L., Ran, F.A., Cox, D., Lin, S., Barretto, R., Habib, N., Hsu, P. D., Wu, X., Jiang, W., Marraffini, L. A., & Zhang, F. Science February 15; 339(6121):819-23 (2013);
[0878] RNA-guided editing of bacterial genomes using CRISPR-Cas systems. Jiang W., Bikard D., Cox D., Zhang F, Marraffini L A. Nat Biotechnol March; 31(3):233-9 (2013);
[0879] One-Step Generation of Mice Carrying Mutations in Multiple Genes by CRISPR/Cas-Mediated Genome Engineering. Wang H., Yang H., Shivalila C S., Dawlaty M M., Cheng A W., Zhang F., Jaenisch R. Cell May 9; 153(4):910-8 (2013);
[0880] Optical control of mammalian endogenous transcription and epigenetic states. Konermann S, Brigham M D, Trevino A E, Hsu P D, Heidenreich M, Cong L, Platt R J, Scott D A, Church G M, Zhang F. Nature. August 22; 500(7463):472-6. doi: 10.1038/Nature12466. Epub 2013 Aug. 23 (2013);
[0881] Double Nicking by RNA-Guided CRISPR Cas9 for Enhanced Genome Editing Specificity. Ran, F A., Hsu, P D., Lin, C Y., Gootenberg, J S., Konermann, S., Trevino, A E., Scott, D A., Inoue, A., Matoba, S., Zhang, Y., & Zhang, F. Cell August28. pii: S0092-8674(13)01015-5 (2013-A);
[0882] DNA targeting specificity of RNA-guided Cas9 nucleases. Hsu, P., Scott, D., Weinstein, J., Ran, F A., Konermann, S., Agarwala, V., Li, Y., Fine, E., Wu, X., Shalem, O., Cradick, T J., Marraffini, L A., Bao, G., & Zhang, F. Nat Biotechnol doi:10.1038/nbt.2647 (2013);
[0883] Genome engineering using the CRISPR-Cas9 system. Ran, F A., Hsu, P D., Wright, J., Agarwala, V., Scott, D A., Zhang, F. Nature Protocols November; 8(11):2281-308 (2013-B);
[0884] Genome-Scale CRISPR-Cas9 Knockout Screening in Human Cells. Shalem, O., Sanjana, N E., Hartenian, E., Shi, X., Scott, D A., Mikkelson, T., Heckl, D., Ebert, B L., Root, D E., Doench, J G., Zhang, F. Science December 12. (2013). [Epub ahead of print];
[0885] Crystal structure of cas9 in complex with guide RNA and target DNA. Nishimasu, H., Ran, F A., Hsu, P D., Konermann, S., Shehata, S I., Dohmae, N., Ishitani, R., Zhang, F., Nureki, O. Cell February 27, 156(5):935-49 (2014);
[0886] Genome-wide binding of the CRISPR endonuclease Ca.s9 in mammalian cells. Wu X., Scott D A., Kriz A J., Chiu A C., Hsu P D., Dadon D B., Cheng A W., Trevino A E., Konermann S., Chen S., Jaenisch R. Zhang F., Sharp P A. Nat Biotechnol. April 20. doi: 10.1038/nbt.2889 (2014);
[0887] CRISPR-Cas9 Knockin Mice for Genome Editing and Cancer Modeling. Platt R J, Chen S, Zhou Y, Yim M J, Swiech L, Kempton H R, :Dahlman J E, Parnas O, Eisenhaure T M, Jovanovic M, Graham D B, Jhunjhunwala S, Heidenreich M, Xavier R J, Langer R, Anderson D G, Hacohen N, Regev A, Feng G, Sharp P A, Zhang F. Cell 159(2): 440-455 DOI: 10.1016/j.cell.2014.09.014(2014);
[0888] Development and Applications of CRISPR-Cas9 for Genome Engineering, Hsu P D, Lander E S, Zhang F., Cell. June 5; 157(6):1262-78 (2014).
[0889] Genetic screens in human cells using the CRISPR/Cas9 system, Wang T, Wei J J, Sabatini D M, Lander E S., Science. January 3; 343(6166): 80-84. doi:10.1126/science.1246981 (2014);
[0890] Rational design of highly active sgRNAs for CRISPR-Cas9-mediated gene inactivation, Doench J G, Hartenian E, Graham D B, Tothova Z, Hegde N I, Smith I, Sullender M, Ebert B L, Xavier R I, Root D E., (published online 3 Sep. 2014) Nat Biotechnol. December; 3 (12):1262-7 (2014);
[0891] In vivo interrogation of gene function in the mammalian brain using CRISPR-Cas9, Swiech L, Heidenreich M, Banerjee A, Habib N, Li Y, Trombetta J, Sur M, Zhang F., (published online 19 Oct. 2014) Nat Biotechnol. January; 33(1):102-6 (2015);
[0892] Genome-scale transcriptional activation by an engineered CRISPR-Ca.s9 complex, Konermann S, Brigham M D, Trevino A E, Joung J, Abudayyeh O O, Barcena C, Hsu P D, Habib N, Gootenberg J S, Nishimasu H, Nureki O, Zhang F., Nature. January 29; 517(7534583-8 (2015).
[0893] A split-Cas9 architecture for inducible genome editing and transcription modulation, Zetsche B, Volz S E, Zhang F., (published online 2 Feb. 2015) Nat Biotechnol. February; 33(2):139-42. (2015);
[0894] Genome-wide CRISPR Screen in a Mouse Model of Tumor Growth and Metastasis, Chen S, Sanjana N E, Zheng K, Shalem O, Lee K, Shi X, Scott D A, Song J, Pan J Q, Weissleder R, Lee H, Zhang F, Sharp P A. Cell 160, 1246-1260, Mar. 12, 2015 (multiplex screen in mouse), and
[0895] In vivo genome editing using Staphylococcus aureus Cas9, Ran F A, Cong L, Yan W X, Scott D A, Gootenberg J S, Kriz A J, Zetsche B, Shalem O, Wu X, Makarova K S, Koonin E V, Sharp P A, Zhang F., (published online 1 Apr. 2015), Nature. April 9; 520(7546):186-91 (2015).
[0896] Shalem et al., “High-throughput functional genomics using CRISPR-Cas9,” Nature Reviews Genetics 16, 299-311 (May 2015).
[0897] Xu et al., “Sequence determinants of improved CRISPR sgRNA. design,” Genome Research 25, 1147-1157 (August 2015).
[0898] Parnas et al., “A Genome-wide CRISPR Screen in Primary Immune Cells to Dissect Regulatory Networks,” Cell 162, 675-686 (Jul. 30, 2015).
[0899] Ramanan et al,, CRISPR/Cas9 cleavage of viral DNA efficiently suppresses hepatitis B virus,” Scientific Reports 5:10833. doi: 10.1038/srep10833 (Jun. 2, 2015).
[0900] Nishimasu et al., Crystal Structure of Staphylococcus aureus Cas9,” Cell 162, 1113-1126 (Aug. 27, 2015).
[0901] BCL11A enhancer dissection by Cas9-mediated in situ saturating mutagenesis, Canver et al., Nature 527(7577):192-7 (Nov. 12, 2015) doi: 10.1038/nature15521. Epub 2015 Sep. 16.
[0902] Cpf1 Is a Single RNA-Guided Endonuclease of a Class 2 CRISPR-Cas System, Zetsche et al., Cell 163, 759-71 (Sep. 25, 2015).
[0903] Discovery and Functional Characterization of Diverse Class 2 CRISPR-Cas Systems, Shmakov et al., Molecular Cell, 60(3), 385-397 doi: 10.1016/j.molcel.2015,10.008 Epub Oct. 22, 2015.
[0904] Rationally engineered Cas9 nucleases with improved specficity, Slaymaker et al., Science 2016 Jan. 1, 351(6268): 84-88 doi: 10.1126/science.aad5227. Epub 2015 Dec. 1. [Epub ahead of print].
   each of which is incorporated herein by reference, may be considered in the practice of the instant invention, and discussed briefly below:
[0905] Cong et al. engineered type II CRISPR-Cas systems for use in eukaryotic cells based on both Streptococcus thermophilus Cas9 and also Streptococcus pyogenes Cas9 and demonstrated that Cas9 nucleases can be directed by short RNAs to induce precise cleavage of DNA in human and mouse cells. Their study further showed that Cas9 as converted into a nicking enzyme can be used to facilitate homology-directed repair in eukaryotic cells with minimal mutagenic activity. Additionally, their study demonstrated that multiple guide sequences can be encoded into a single CRISPR array to enable simultaneous editing of several at endogenous genomic loci sites within the mammalian genome, demonstrating easy programmability and wide applicability of the RNA-guided nuclease technology. This ability to use RNA to program sequence specific DNA cleavage in cells defined a new class of genome engineering tools. These studies further showed that other CRISPR loci are likely to be transplantable into mammalian cells and can also mediate mammalian genome cleavage. Importantly, it can be envisaged that several aspects of the CRISPR-Cas system can be further improved to increase its efficiency and versatility.
[0906] Jiang et al. used the clustered, regularly interspaced, short palindromic repeats (CRISPR)-associated Cas9 endonuclease complexed with dual-RNAs to introduce precise mutations in the genomes of Streptococcus pneumoniae and Escherichia coli. The approach relied on dual-RNA:Cas9-directed cleavage at the targeted genomic site to kill unmutated cells and circumvents the need for selectable markers or counter-selection systems. The study reported reprogramming dual-RNA:Cas9 specificity by changing the sequence of short CRISPR RNA (crRNA) to make single- and multinucleotide changes carried on editing templates. The study showed that simultaneous use of two crRNAs enabled multiplex mutagenesis. Furthermore, when the approach was used in combination with recombineering, in pneumoniae, nearly 100% of cells that were recovered using the described approach contained the desired mutation, and in E. coli, 65% that were recovered contained the mutation.
[0907] Wang et al. (2013) used the CRISPR/Cas system for the one-step generation of mice carrying mutations in multiple genes which were traditionally generated in multiple steps by sequential recombination in embryonic stem cells and/or time-consuming intercrossing of mice with a single mutation. The CRISPR/Cas system will greatly accelerate the in vivo study of functionally redundant genes and of epistatic gene interactions.
[0908] Konermann et al. (2013) addressed the need in the art for versatile and robust technologies that enable optical and chemical modulation of DNA-binding domains based CRISPR Cas9 enzyme and also Transcriptional Activator Like Effectors
[0909] Ran et al. (2013-A) described an approach that combined a Ca.s9 nickase mutant with paired guide RNAs to introduce targeted double-strand breaks. This addresses the issue of the Cas9 nuclease from the microbial CRISPR-Cas system being targeted to specific genomic loci by a guide sequence, which can tolerate certain mismatches to the DNA target and thereby promote undesired off-target mutagenesis. Because individual nicks in the genome are repaired with high fidelity, simultaneous nicking via appropriately offset guide RNAs is required for double-stranded breaks and extends the number of specifically recognized bases for target cleavage. The authors demonstrated that using paired nicking can reduce off-target activity by 50- to 1,500-fold in cell lines and to facilitate gene knockout in mouse zygotes without sacrificing on-target cleavage efficiency. This versatile strategy enables a wide variety of genome editing applications that require high specificity.
[0910] Hsu et al. (2013) characterized SpCas9 targeting specificity in human cells to inform the selection of target sites and avoid off-target effects. The study evaluated >700 guide RNA variants and SpCas9-induced indel mutation levels at >100 predicted genomic off-target loci in 293T and 293FT cells. The authors that SpCas9 tolerates mismatches between guide RNA and target DNA at different positions in a sequence-dependent manner, sensitive to the number, position and distribution of mismatches. The authors further showed that SpCas9-mediated cleavage is unaffected by DNA methylation and that the dosage of SpCas9 and sgRNA can be titrated to minimize off-target modification. Additionally, to facilitate mammalian genome engineering applications, the authors reported providing a web-based software tool to guide the selection and validation of target sequences as well as off-target analyses.
[0911] Ran el al. (2013-B) described a set of tools for Cas9-mediated genome editing via non-homologous end joining (NHEJ) or homology-directed repair (HDR) in mammalian cells, as well as generation of modified cell lines for downstream functional studies. To minimize off-target cleavage, the authors further described a double-nicking strategy using the Cas9 nickase mutant with paired guide RNAs. The protocol provided by the authors experimentally derived guidelines for the selection of target sites, evaluation of cleavage efficiency and analysis of off-target activity. The studies showed that beginning with target design, gene modifications can be achieved within as little as 1-2 weeks, and modified clonal cell lines can be derived within 2-3 weeks.
[0912] Shalem et al. described a new way to interrogate gene function on a genome-wide scale. Their studies showed that delivery of a genome-scale CRISPR-Cas9 knockout (GeCKO) library targeted 18,080 genes with 64,751 unique guide sequences enabled both negative and positive selection screening in human cells. First, the authors showed use of the GeCKO library to identify genes essential for cell viability in cancer and pluripotent stem cells. Next, in a melanoma model, the authors screened for genes whose loss is involved in resistance to vemurafenib, a therapeutic that inhibits mutant protein kinase BRAE Their studies showed that the highest-ranking candidates included previously validated genes NF1 and MED12 as well as novel hits NF2, CUL3, TADA2B, and TADA1. The authors observed a high level of consistency between independent guide RNAs targeting the same gene and a high rate of hit confirmation, and thus demonstrated the promise of genome-scale screening with Cas9.
[0913] Nishimasu et al. reported the crystal structure of Streptococcus pyogenes Cas9 in complex with sgRNA and its target DNA at 2.5 A° resolution. The structure revealed a bilobed architecture composed of target recognition and nuclease lobes, accommodating the sgRNA:DNA. heteroduplex in a positively charged groove at their interface. Whereas the recognition lobe is essential for binding sgRNA and DNA, the nuclease lobe contains the HNH and RuvC nuclease domains, which are properly positioned for cleavage of the complementary and non-complementary strands of the target DNA, respectively. The nuclease lobe also contains a carboxyl-terminal domain responsible for the interaction with the protospacer adjacent motif (PAM). This high-resolution structure and. accompanying functional analyses have revealed the molecular mechanism of RNA-guided DNA targeting by Cas9, thus paving the way for the rational design of new, versatile genome-editing technologies.
[0914] Wu et al. mapped genome-wide binding sites of a catalytically inactive Cas9 (dCas9) from Streptococcus pyogenes loaded with single guide RNAs (sgRNAs) in mouse embryonic stem cells (mESCs). The authors showed that each of the four sgRNAs tested targets dCas9 to between tens and thousands of genomic sites, frequently characterized by a 5-nucleotide seed region in the sgRNA and an NGG protospacer adjacent motif (PAM). Chromatin inaccessibility decreases dCas9 binding to other sites with matching seed sequences; thus 70% of off-target sites are associated with genes. The authors showed that targeted sequencing of 295 dCas9 binding sites in mESCs transfected with catalytically active Cas9 identified only one site mutated above background levels, The authors proposed a two-state model for Cas9 binding and cleavage, in which a seed match triggers binding but extensive pairing with target DNA is required for cleavage.
[0915] Platt et al. established a Cre-dependent Cas9 knockin mouse. The authors demonstrated in vivo as well as ex vivo genome editing using adeno-associated virus (AAV)-, lentivirus-, or particle-mediated delivery of guide RNA in neurons, immune cells, and endothelial cells.
[0916] Hsu et al. (2014) is a review article that discusses generally CRISPR-Cas9 history from yogurt to genome editing, including genetic screening of cells.
[0917] Wang et al. (2014) relates to a pooled, loss-of-function genetic screening approach suitable for both positive and negative selection that uses a genome-scale lentiviral single guide RNA (sgRNA) library.
[0918] Doench et al. created a pool of sgRNAs, tiling across all possible target sites of a panel of six endogenous mouse and three endogenous human genes and quantitatively assessed their ability to produce null alleles of their target gene by antibody staining and flow cytometry. The authors showed that optimization of the PAM improved activity and also provided an on-line tool for designing sgRNAs.
[0919] Swiech el al. demonstrate that AAV-rnediated SpCas9 genome editing can enable reverse genetic studies of gene function in the brain.
[0920] Konermann et al. (2015) discusses the ability to attach multiple effector domains, e.g., transcriptional activator, functional and epigenomic regulators at appropriate positions on the guide such as stem or tetraloop with and without linkers.
[0921] Zetsche et al, demonstrates that the Cas9 enzyme can be split into two and hence the assembly of Cas9 for activation can be controlled.
[0922] Chen et al. relates to multiplex screening by demonstrating that a genome-wide in vivo CRISPR-Cas9 screen in mice reveals genes regulating lung metastasis.
[0923] Ran et al. (2015) relates to SaCas9 and its ability to edit genomes and demonstrates that one cannot extrapolate from biochemical assays. Shalem et al. (2015) described ways in which catalytically inactive Cas9 (dCas9) fusions are used to synthetically repress (CRISPRi) or activate (CRISPRa) expression, showing. advances using Cas9 for genome-scale screens, including arrayed and pooled screens, knockout approaches that inactivate genornic loci and strategies that modulate transcriptional activity. End Edits
[0924] Shalem et al. (2015) described ways in which catalytically inactive Cas9 (dCas9) fusions are used to synthetically repress (CRISPRi) or activate (CRISPRa) expression, showing. advances using Cas9 for genome-scale screens, including arrayed and pooled screens, knockout approaches that inactivate genomic loci and strategies that modulate transcriptional activity.
[0925] Xu et al, (2015) assessed the DNA sequence features that contribute to single guide RNA (sgRNA) efficiency in CRISPR-based screens. The authors explored efficiency of CRISPR/Cas9 knockout and nucleotide preference at the cleavage site. The authors also found that the sequence preference for CRISPRi/a is substantially different from that for CRISPR/Cas9 knockout.
[0926] Parnas et al. (2015) introduced genome-wide pooled CRISPR-Cas9 libraries into dendritic cells (DCs) to identify genes that control the induction of tumor necrosis factor (Tnf) by bacterial lipopolysaccharide (LPS). Known regulators of Tlr4 signaling and previously unknown candidates were identified and classified into three functional modules with distinct effects on the canonical responses to LPS.
[0927] Ramanan et al (2015) demonstrated cleavage of viral episomal DNA (cccDNA) in infected cells. The HBV genome exists in the nuclei of infected hepatocytes as a 3.2 kb double-stranded episomal DNA species called covalently closed circular DNA (cccDNA), which is a key component in the HBV life cycle whose replication is not inhibited by current therapies. The authors showed that sgRNAs specifically targeting highly conserved regions of HBV robustly suppresses viral replication and depleted cccDNA.
[0928] Nishimasu et al, (2015) reported the crystal structures of SaCas9 in complex with a single guide RNA (sgRNA) and its double-stranded DNA targets, containing the 5′-TTGAAT-3′ PAM and the 5′-TTGGGT-3′ PAM. A structural comparison of SaCas9 with SpCas9 highlighted both structural conservation and divergence, explaining their distinct PAM specificities and orthologous sgRNA recognition.
[0929] Canver et al. (2015) demonstrated a CRISPR-Cas9-based functional investigation of non-coding genomic elements. The authors we developed pooled CRISPR-Cas9 guide RNA libraries to perform in situ saturating mutagenesis of the human and mouse BCL11A enhancers which revealed critical features of the enhancers.
[0930] Zetsche et al. (2015) reported characterization of Cpf1, a class 2 CRISPR nuclease from Francisella novicida U112 having features distinct from Cas9. Cpf1 is a single RNA-guided endonuclease lacking tracrRNA, utilizes a T-rich protospacer-adjacent motif and cleaves DNA via a staggered DNA double-stranded break.
[0931] Shmakov et al. (2015) reported three distinct Class 2 CRISPR-Cas systems. Two system CRISPR enzymes (C2c1 and C2c3) contain RuvC-like endonuclease domains distantly related to Cpf1. Unlike Cpf1, C2c1 depends on both crRNA and tracrRNA. for DNA cleavage. The third enzyme (C2c2) contains two predicted HEPN RNase domains and is tracrRNA independent.
[0932] Slaymaker et al (2016) reported the use of structure-guided protein engineering to improve the specificity of Streptococcus pyogenes Cas9 (SpCas9). The authors developed “enhanced specificity” SpCas9 (eSpCas9) variants which maintained robust on-target cleavage with reduced off-target effects.

[0933] Also, “Dimeric CRISPR RNA-guided FokI nucleases for highly specific genome editing”, Shengdar Q. Tsai, Nicolas Wyvekens, Cyd Khayter, Jennifer A. Foden, Vishal Thapar, Deepak Reyon, Mathew J. Goodwin, Martin J. Aryee, J. Keith Joung Nature Biotechnology 32(6): 569-77 (2014), relates to dimeric RNA-guided FokI Nucleases that recognize extended. sequences and can edit endogenous genes with high efficiencies in human cells.

[0934] With respect to general information on CRISPR-Cas Systems, components thereof, and delivery of such components, including methods, materials, delivery vehicles, vectors, particles, AAV, and making and using thereof, including as to amounts and formulations, all useful in the practice of the instant invention, reference is made to: U.S. Pat. Nos, 8,999,641, 8,993,233, 8,945,839, 8,932,814, 8,906,616, 8,895,308, 8,889,418, 8,889,356, 8,871,445, 8,865,406, 8,795,965, 8,771,945 and 8,697,359; US Patent Publications US 2014-0310830 (U.S. application Ser. No. 14/105,031), US 2014-0287938 Al (U.S. application Ser. No. 14/213,991), US 2014-0273234 A1 (U.S. application Ser. No. 14/293,674), US2014-0273232 Al (U.S. application Ser. No. 14/290,575), US 2014-0273231 (U.S. application Ser. No. 14/259,420), US 2014-0256046 A1 (U.S. application Ser. No. 14/226,274), US 2014-0248702 A1 (U.S. application Ser. No. 14/258,458), US 2014-0242700 A1 (U.S. applicaiton Ser. No. 14/222,930), US 2014-0242699 A1 (U.S. application Ser. No. 14/183,512), US 2014-0242664 A1 (U.S. application Ser. No. 14/104,990), US 2014-0234972 A1 (U.S. application Ser. No. 14/183,471), US 2014-0227787 A1 (U.S. application Ser. No. 14/256,912), US 2014-0189896 A1 (U.S. application Ser. No. 14/105,035), US 2014-0186958 (U.S. application Ser. No. 14/105,017), US 2014-0186919 A1 (U.S. application Ser. No. 14/104,977), US 2014-0186843 A1 (U.S. application Ser, No. 14/104,900), US 2014-0179770 A1 (U.S. application Ser. No. 14/104,837) and US 2014-0179006 A1 (U.S. application Ser. No. 14/183,486), US 2014-0170753 (U.S. application Ser. No. 14/183,429), US 2015-0184139 (U.S. application Ser. No. 14/324,960), Ser. No. 14/054,414; European Patents EP 2 764 103 (EP13824232.6), EP 2 784 162 (EP1.4170383.5)and EP 2 771 468 (EP1381.8570.7); and PCT Patent Publications PCT Patent Publications WO 2014/093661 (PCT/US2013/074743), WO 2014/093694 (PCT/US2013/074790), WO 2014/093595 (PCT/US2013/074611), WO 2014/093718 (PCT/US2013/074825), WO 2014/093709 (PCT/US2013/074812), WO 2014/093622 (PCT/US2013/074667), WO 2014/093635 (PCT/US2013/074691), WO 2014/093655 (PCT/US2013/074736), WO 2014/093712 (PCT/US2013/074819), WO 2014/093701 (PCT/US2013/074800), WO 2014/018423 (PCT/US2013/051418), WO 2014/204723 (PCT/US2014/041.790), WO 2014/204724 (PCT/US2014/041800), WO 2014/204725 (PCT/US2014/041803), WO 2014/204726 (PCT/US2014/041.804), WO 2014/204727 (PCT/US2014/041806), WO 2014/204728 (PCT/US2014/041.808), WO 2014/204729 (PCT/US2014/041809), WO 2015/089351 (PCT/US2014/069897), WO 2015/089354 (PCT/US2014/069902), WO 2015/089364 (PCT/US2014/069925), WO 2015/089427 (PCT/US2014/070068), WO 2015/089462 (PCT/US2014/070127), WO 2015/089419 (PCT/US2014/070057), WO 2015/089465 (PCT/US2014/070135), WO 2015/089486 (PCT/US2014/0701.75), PCT/US2015/051691, PCT/US2015/051830. Reference is also made to U.S. provisional patent applications 61/758,468; 61/802,174; 61/806,375; 61/814,263; 61/819,803 and 61/828,130, tiled on Jan. 30, 2013; Mar. 15, 2013; Mar. 28, 2013; Apr. 20, 2013; May 6, 2013 and May 28, 2013 respectively. Reference is also made to U.S. provisional patent application 61/836,123, filed on Jun. 17, 2013. Reference is additionally made to U.S. provisional patent applications 61/835,931, 61/835,936, 61/836,127, 61/836,101, 61/836,080 and 61/835,973, each filed Jun. 17, 2013. Further reference is made to U.S. provisional patent applications 61/862,468 and 61/862,355 filed on Aug. 5, 2013; 61/871,301 filed on Aug. 28, 2013; 61/960,777 filed on Sep. 25, 2013 and 61/961,980 filed on Oct. 28, 2013. Reference is yet further made to: PCT Patent applications Nos: PCT/US2014/041803, PCT/US2014/041800, PCT/US2014/041809, PCT/US2014/041804 and PCT/US2014/041806, each filed Jun. 10, 2014; PCT/US2014/041808 filed Jun. 11, 2014; and PCT/US2014/62558 filed Oct. 28, 2014, and U.S. Provisional Patent Applications Ser. Nos. 61/915,148, 61/915,150, 61/915,153, 61/915,203, 61/915,251, 61/915,301, 61/915,267, 61/915,260, and 61/915,397, each filed Dec. 12, 2013; 61/757,972 and 61/768,959, filed on Jan. 29, 2013 and Feb. 25, 2013; 61/835,936, 61/836,127, 61/836,101, 61/836,080, 61/835,973, and 61/835,931, filed Jun. 17, 2013; 62/010,888 and 62/010,879, both filed Jun. 11, 2014; 62/010,329 and 62/010,441, each filed Jun. 10, 2014; 61/939,228 and 61/939,242, each filed Feb. 12, 2014; 61/980,012, filed Apr. 15, 2014; 62/038,358, filed Aug. 17, 2014; 62/054,490, 62/055,484, 62/055,460 and 62/055,487, each filed Sep. 25, 2014; and 62/069,243, filed Oct. 27, 2014. Reference is made to U.S. provisional patent application 61/930,214 filed on Jan. 22, 2014.

[0935] Mention is also made of U.S. application 62/180,709, filed 17-Jun.-15, PROTECTED GUIDE RNAS (PGRNAS); U.S. application 62/091,455, filed, 12-Dec.-14, PROTECTED GUIDE RNAS (PGRNAS); U.S. application 62/096,708, 24-Dec.-14, PROTECTED GUIDE RNAS (PGRNAS); U.S. application 62/091,462, 12-Dec.-14,DEAD GUIDES FOR CRISPR TRANSCRIPTION FACTORS; U.S. application 62/096,324, 23-Dec.-14, 62/180,681, 17-Jun.-2015, and 62/237,496, 5-Oct.-2015, DEAD GUIDES FOR CRISPR TRANSCRIPTION FACTORS; U.S. application 62/091,456, 12-Dec.-14 and 62/180,692, 1 7-Jun.-2015. ESCORTED AND FUNCTIONALIZED GUIDES FOR CRISPR-CAS SYSTEMS; U.S. application 62/091,461, 12-Dec.-14, DELIVERY, USE AND THERAPEUTIC APPLICATIONS OF THE CRISPR-CAS SYSTEMS AND COMPOSITIONS FOR GENOME EDITING AS TO HEMATOPOETIC STEM CELLS (HSCs); U.S. application 62/094,903, 19-Dec.-14, UNBIASED IDENTIFICATION OF DOUBLE-STRAND BREAK S ANT) GENOMIC REARRANGEMENT BY GENOME-WISE INSERT CAPTURE SEQUENCING; U.S. application 62/096,761, 24-Dec.-14, ENGINEERING OF SYSTEMS, METHODS ANI) OPTIMIZED ENZYME ANI) GUIDE SCAFFOLDS FOR SEQUENCE MANIPULATION; U.S. application 62/098,059, 30-Dec.-14 and 62/181,667, 18-Jun.-2015, RNA-TARGETING SYSTEM; U.S. application 62/096,656, 24-Dec.-14 and 62/181,151, 17-Jun.-2015, CRISPR HAVING OR ASSOCIATED WITH DESTABILIZATION DOMAINS; U.S. application 62/096,697, 24-Dec.-14, CRISPR HAVING OR ASSOCIATED WITH AAV; U.S. application 62/098,158, 30-Dec.-14, ENGINEERED CRISPR COMPLEX INSERTIONAL TARGETING SYSTEMS; U.S. application 62/151,052, 22-Apr.-15, CELLULAR TARGETING FOR EXTRACELLULAR EXOSOMAL REPORTING; U.S. application 62/054,490, 24-Sep.-14, DELIVERY, USE AND THERAPEUTIC APPLICATIONS OF THE CRISPR-CAS SYSTEMS AND COMPOSITIONS FOR TARGETING DISORDERS AND DISEASES USING PARTICLE DELIVERY COMPONENTS; U.S. application 61/939,154, 12-Feb.-14, SYSTEMS, METHODS AND COMPOSITIONS FOR SEQUENCE MANIPULATION WITH OPTIMIZED FUNCTIONAL CRISPR-CAS SYSTEMS; U.S. application 62/055,484, 25-Sep.-14, SYSTEMS, METHODS AND COMPOSITIONS FOR SEQUENCE MANIPULATION WITH OPTIMIZED FUNCTIONAL CRISPR-CAS SYSTEMS; U.S. application 62/087,537, 4-Dec.-14, SYSTEMS, METHODS AND COMPOSITIONS FOR SEQUENCE MANIPULATION WITH OPTIMIZED FUNCTIONAL CRISPR-CAS SYSTEMS; U.S. application 62/054,651, 24-Sep.-14, DELIVERY, USE AND THERAPEUTIC APPLICATIONS OF THE CRISPR-CAS SYSTEMS AND COMPOSITIONS FOR MODELING COMPETITION OF MULTIPLE CANCER MUTATIONS IN VIVO; U.S. application 62/067,886, 23-Oct.-14, DELIVERY, USE AND THER.APEUTIC APPLICATIONS OF THE CRISPR-CAS SYSTEMS AND COMPOSITIONS FOR MODELING COMPETITION OF MULTIPLE CANCER MUTATIONS IN VIVO; U.S. application 62/054,675, 24-Sep.-14 and 62/181,002, 17-Jun.-2015, DELIVERY, USE AND THERAPEUTIC APPLICATIONS OF THE CRISPR-CAS SYSTEMS ANI) COMPOSITIONS IN NEURONAL CELLS/TISSUES; U.S. application 62/054,528, 24-Sep.-14, DELIVERY, USE AND THERAPEUTIC APPLICATIONS OF THE CRISPR-CAS SYSTEMS AND COMPOSITIONS IN IMMUNE DISEASES OR DISORDERS; U.S. application 62/055,454, 25-Sep.-14, DELIVERY, USE AND THERAPEUTIC APPLICATIONS OF THE CRISPR-CAS SYSTEMS AND COMPOSITIONS FOR TARGETING DISORDERS AND DISEASES USING CELL PENETRATION PEPTIDES (CPP); U.S. application 62/055,460, 25-Sep.-14, MULTIFUNCTIONAL-CRISPR COMPLEXES AND/OR OPTIMIZED ENZYME LINKED FUNCTIONAL-CRISPR COMPLEXES; U.S. application 62/087,475, 4-Dec.-14, FUNCTIONAL SCREENING WITH OPTIMIZED FUNCTIONAL CRISPR-CAS SYSTEMS; U.S. application 62/055,487, 25-Sep.-14, FUNCTIONAL SCREENING WITH OPTIMIZED FUNCTIONAL CRISPR-CAS SYSTEMS; U.S. application 62/087,546, 4-Dec.-14 and 62/181,687, 18-Jun.-2015, MULTIFUNCTIONAL CRISPR COMPLEXES AND/OR OPTIMIZED ENZYME LINKED FUNCTIONAL-CRISPR COMPLEXES; and U.S. application 62/098,285, 30-Dec.-14, CRISPR MEDIATED IN VIVO MODELING AND GENETIC SCREENING OF TUMOR GROWTH AND METASTASIS.

[0936] Mention is made of U.S. applications 62/181,659, 18-Jun.-2015 and 62/207,318 19-Aug.-2015, ENGINEERING AND OPTIMIZATION OF SYSTEMS, METHODS, ENZYME AND GUIDE SCAFFOLDS OF CAS9 ORTHOLOGS AND VARIANTS FOR SEQUENCE MANIPULATION. Mention is made of U.S. applications 62/181,675, 18-Jun.-2015, and Attorney Docket No. 46783.01.2128, filed 22-Oct.-2015, NOVEL CRISPR. ENZYMES AND SYSTEMS, U.S. application 62/232,067, 24-Sep.-2015, U.S. application 62/205,733, 16-Aug.-2015, U.S. application 62/201,542, 5-Aug.-2015, U.S. application 62/193,507, 16-Jul.-2015, and U.S. application 62/181,739, 18-Jun.-2015, each entitled NOVEL CRISPR ENZYMES AND SYSTEMS and of U.S. application 62/245,270, 22-Oct.-2015, NOVEL CRISPR ENZYMES AND SYSTEMS. Mention is also made of U.S. application 61/939,256, 12-Feb.-2014, and WO 2015/089473 (PCT/US2014/070152), 12-Dec.-2014, each entitled ENGINEERING OF SYSTEMS, METHODS AND OPTIMIZED GUIDE COMPOSITIONS WITH NEW ARCHITECTURES FOR SEQUENCE MANIPULATION. Mention is also made of PCT/US2015/045504, 15-Aug.-2015, U.S. application 62/180,699, 17-Jun.-2015, and U.S. application 62/038,358, 17-Aug.-2014, each entitled GENOME EDITING USING CAS9 NICKASES.

[0937] Each of these patents, patent publications, and applications, and all documents cited therein or during their prosecution (“appin cited documents”) and all documents cited or referenced in the appin cited documents, together with any instructions, descriptions, product specifications, and product sheets for any products mentioned therein or in any document therein. and incorporated by reference herein, are hereby incorporated herein by reference, and may be employed in the practice of the invention. All documents (e.g., these patents, patent publications and applications and the a.ppin. cited documents) are incorporated herein by reference to the same extent as if each individual document was specifically and individually indicated to be incorporated by reference.

[0938] In addition, mention is made of PCT application PCT/US14/70057, Attorney Reference 47627.99.2060 and BI-2013/107 entitiled “DELIVERY, USE AND THERAPEUTIC APPLICATIONS OF THE CRISPR-CAS SYSTEMS AND COMPOSITIONS FOR TARGETING DISORDERS AND DISEASES USING PARTICLE DELIVERY COMPONENTS (claiming priority from one or more or all of U.S. provisional patent applications: 62/054,490, filed Sep. 24, 2014; 62/010,441, filed Jun. 10, 2014; and 61/915,118, 61/915,215 and 61/915,148, each filed on Dec. 12, 2013) (“the Particle Delivery PCT”), incorporated herein by reference, with respect to a method of preparing an sgRNA-and-Cas9 protein containing particle comprising admixing a mixture comprising an sgRNA and Cas9 protein (and optionally HDR template) with a mixture comprising or consisting essentially of or consisting of surfactant, phospholipid, biodegradable polymer, lipoprotein and alcohol; and particles from such a process. For example, wherein Cas9 protein and sgRNA were mixed together at a suitable, e.g., 3:1 to 1:3 or 2:1 to 1:2 or 1:1 molar ratio, at a suitable temperature, e.g., 15-30 C, e.g., 20-25 C, e.g., room temperature, for a suitable time, e.g., 15-45, such as 30 minutes, advantageously in sterile, nuclease free buffer, e.g., 1×PBS. Separately, particle components such as or comprising: a surfactant, e.g., cationic lipid, e.g., 1,2-dioleoyl-3-trimethylammonium-propane (DOTAP); phospholipid, e.g., dimyristoylphosphatidylcholine (DMPC); biodegradable polymer, such as an ethylene-glycol polymer or REG, and a lipoprotein, such as a low-density lipoprotein, e.g., cholesterol were dissolved in an alcohol, advantageously a C₁₋₆ alkyl alcohol, such as methanol, ethanol, isopropanol, e.g., 100% ethanol. The two solutions were mixed together to form particles containing the Cas9-sgRNA complexes. Accordingly, sgRNA may be pre-complexed with the Cas9 protein, before formulating the entire complex in a particle. Formulations may be made with a different molar ratio of different components known to promote delivery of nucleic acids into cells (e.g. 1,2-dioleoyl-3-trimethylammonium-propane (DOTAP), 1,2-ditetradecanoyl-sn-glycero-3-phosphocholine (DMPC), polyethylene glycol. (PEG), and cholesterol) For example DOTAP DMPC:PEG:Cholesterol Molar Ratios may be DOTAP 100, DMPC 0, PEG 0, Cholesterol 0; or DOTAP 90, DMPC 0, PEG 10, Cholesterol 0; or DOTAP 90, DMPC 0, PEG 5, Cholesterol 5. DOTAP 100, DMPC 0, PEG 0, Cholesterol 0. That application accordingly comprehends admixing sgRNA, Cas9 protein and components that form a particle; as well as particles from such admixing. Aspects of the instant invention can involve particles; for example, particles using a process analogous to that of the Particle Delivery PCT, e.g., by admixing a mixture comprising sgRNA and/or Cas9 as in the instant invention and components that form a particle, e.g., as in the Particle Delivery PCT, to form a particle and particles from such admixing (or, of course, other particles involving sgRNA and/or Cas9 as in the instant invention).

[0939] The present invention will be further illustrated in the following Examples which are given for illustration purposes only and are not intended to limit the invention in any way.

### EXAMPLES

### Example 1

### Origin and Evolution of Adaptive Immunity Systems

[0940] Classification and annotation of CRISPR-Cas systems in archaeal and bacterial genomes. The CRISPR-Cas loci has more than 50 gene families and there is no strictly universal genes, fast evolution, extreme diversity of loci architecture. Therefore, no single tree feasible and a multi-pronged approach is needed. So far, there is comprehensive cas gene identification of 395 profiles for 93 Cas proteins. Classification includes signature gene profiles plus signatures of locus architecture

[0941] A new classification of CRISPR-Cas systems is proposed in FIG. 1. Class 1 includes multisubunit crRNA-effector complexes (Cascade) and Class 2 includes Single-subunit crRNA-effector complexes (Cas9-like). FIG. 2 provides a molecular organization of CRISPR-Cas. FIG. 3 provides structures of Type I and III effector complexes: common architecture/common ancestry despite extensive sequence divergence. FIG. 4 shows CRISPR-Cas as a RNA recognition motif (RRM)-centered system. FIG. 5 shows Cast phylogeny where recombination of adaptation and crRNA-effector modules show a major aspect of CRISPR-Cas evolution. FIG. 6 shows a CRISPR-Cas census, specifically a distribution of CRISPR-Cas types/subtypes among archaea and bacteria.

[0942] Cas1 is not always linked to CRISPR-Cas systems, therefore it may be possible that there are two branches of “solo” Cas1 which suggests there may be differences in function and origin and possible novel mobile elements (see Makarova, Krupovic, Koonin, Frontiers Genet 2014). The genome organization of three casposon families may provide some clues. In addition to Casl and Porn, casposons incorporate diverse genes including various nucleases (Krupovic et al. BMC Biology 2014). One family has protein-primed polymerase, another family has RNA-primed polymerase. In addition to diverse Euryarchaeota and Thaumarchaeota, casposons found in several bacteria which suggests horizontal mobility. Casposon Cas1 (transposase/integrase) suggests a basal clade in the Cas1 phylogeny.

[0943] Bacteria and archae utilize CRISPR for adaptive immunity in procaryotes and eukaryotes via genome manipulation. Cas 1 provides a ready made tool for genome manipulation. There are similar mechanisms of integration in casposons and CRISPR, specifically replication-dependent acquisition by copy/paste not cut-and-paste (Krupovic et al. BMC Biology 2014). Casl is a bona fide integra.se (Nuñez J K, Lee A S, Engelman A, Doudna J A. Integrase-mediated spacer acquisition during CRISPR-Cas adaptive immunity. Nature. 2015). February 18). There is similarity between terminal inverted repeats of casposons and CRISPR. (Krupovic et al. BMC Biology 2014). CRISPR-Cas may have originated from a casposon and an innate immunity locus (Koonin, Krupovic, Nature Rev Genet, 2015). The evolution of adaptive immunity systems in prokaryotes and animals may have been along parallel courses with transposon integration at innate immunity loci (Koonin, Krupovic, Nature Rev Genet, 2015). RAG1 transposase (the key enzyme of V(D)J recombination in vertebrates) may have originated from Transib transposons (Kapitonov V V, Jurka J. RAG1 core and V(D)J recombination signal sequences were derived from Transib transposons. PLoS Biol. 2005 Jun;3(6):e181), however, none of the Transibs encodes RAG2. RAG1 and RAG2 encoding transposons are described in Kapitonov, Koonin, Biol Direct 2015 and Transib transposase phylogeny is presented in Kapitonov, Koonin, Biol Direct 2015. Defensive DNA elimination in ciliates evolved from a PiggyMAc transposon and RNAi, an innate immune system (Swart E C, Nowacki M. The eukaryotic way to defend and edit genomes by sRNA-targeted DNA deletion. Ann NY Acad. Sci. 2015).

[0944] The relative stability of the classification implies that the most prevalent variants of CRISPR-Cas systems are already known. However, the existence of rare, currently unclassifiable variants implies that additional types and subtypes remain to be characterized (Makarova et al. 2015. Evolutionary classification of CRISPR-Cas systems and cas genes).

[0945] Transposons play a key contribution to the evolution of adaptive immunity and other systems involved in DNA manipulation. Class 1 CRISPR-Cas originate from transposons but only for an adaptation module. Class 2 CRISPR-Cas have both both adaptation and effector functions where modules may have evolved from different transposons.

### Example 2

### New Predicted Class 2 CRISPR-Cas Systems and Evidence of Their Independent Origins from transposable Elements

[0946] The CRISPR-Cas systems of bacterial and archaeal adaptive immunity show extreme diversity of protein composition and genomic loci architecture. These systems are broadly divided into two classes, Class 1 with multisubunit effector complexes and Class 2 with single-subunit effector modules exemplified by the Cas9 protein (FIGS. 1A and 1B). Applicants developed a simple computational pipeline (FIG. 7) to leverage the expanding genomic and metagenomic databases along with our current understanding of CRISPR-Cas systems for prediction of putative new Class 2 CRISPR-Cas systems. Analysis of the database of complete bacterial genomes using this pipeline resulted in the identification of three new variants, each represented in diverse bacteria and containing cast and cast genes along with a third gene encoding a large protein predicted to function as the effector module. In the first of these loci, the putative effector protein (C2c1p) contains a RuvC-like nuclease domain and resembles the previously described Cpf1 protein, the predicted effector of Type V CRISPR-Cas systems; accordingly, the new putative system is classified as subtype V-B. In depth comparison of protein sequences suggests that the RuvC-containing effector proteins, Cas9, Cpf1 and C2C1p independently evolved from different groups of transposon-encoded TnpB proteins. The second group of new putative CRISPR-Cas loci encompasses a large protein containing two highly diverged HEPN domains with predicted RNAse activity. Given the novelty of the predicted effector protein, these loci are classified as new Type VI CRISPR-Cas that is likely to target mRNA. Together, the results of this analysis show that Class2 CRISPR-Cas systems evolved on multiple, independent occasions, by combination of diverse Cas1-Cas2-encoding adaptation modules with effector proteins derived from different mobile elements. This route of evolution most likely produced multiple variants of Class 2 systems that remain to be discovered.

[0947] The CRISPR-Cas adaptive immunity systems are present in ˜45% bacterial and ˜90% archaeal genomes and show extreme diversity of Cas protein composition and sequence, and genotnic loci architecture. Based on the structural organization of their crRNA-effector complexes, these systems are divided into two classes, namely class 1, with multisubunit effector complexes, and class 2, with single subunit effector complexes (Makarova, 2015) (FIG. 1A and 1B). Class 1 systems are much more common and diverse than Class 2 systems. Class 1 currently is represented by 12 distinct subtypes encoded by numerous archaeal and bacterial genomes, whereas class 2 systems include three subtypes of Type II system and the putative Type V that collectively are found in about 10% of sequenced bacterial genomes (with a single archaeal genome encompassing a putative Type system). Class 2 systems typically contain only three or four genes in the cas operon, namely the cas1-cas2 pair of genes that are involved in adaptation but not in interference, a single multidomain effector protein that is responsible for interference but also contributes to the pre-crRNA processing and adaptation, and often a fourth gene with uncharacterized functions that is dispensable in at least some Type II systems. In most cases, a CRISPR array and a gene for a distinct RNA species known as tracrRNA (trans-encoded small CRISPR RNA) are adjacent to Class 2 cas operons (Chylinski, 2014). The tracrRNA is partially homologous to the repeats within the respective CRISPR array and is essential for the processing of pre-crRNA. that is catalyzed by RNAse III, a ubiquitous bacterial enzyme that is not associated with the CRISPR-cas loci (Deltcheva, 2011)(Chylinski, 2014;Chylinski, 2013).

[0948] The Type II multidomain effector protein Cas9 has been functionally and structurally characterized in exquisite detail. In different bacteria, Cas9 proteins encompass from about 950 to over 1,600 amino acids, such as between about 950 and 1,400 amino acids, and contain two nuclease domains, namely a RuvC-like (RNase H fold) and HNH (McrA-like) nucleases (Makarova, 2011). The crystal structure of Cas9 reveals a bilobed organization of the protein, with distinct target recognition and nuclease lobes, with the latter accommodating both the RuvC and the HNH domains (Nishimasu, 2014)(Jinek, 2014). Each of the nuclease domains of Cas9 is required for the cleavage of one of the target DNA strands (finek, 2012; Sa.pranauskas, 2011) Recently, Cas9 has been shown to contribute to all three stages of the CRISPR response, that is not only target DNA cleavage (interference) but also adaptation and pre-crRNA processing (Jinek, 2012). More specifically, a distinct domain in the nuclease lobe of Cas9 has been shown to recognize and bind the Protospacer-Associated Motif (PAM) in viral DNA during the adaptation stage (Nishimasu, 2014)(Jinek, 2014)(Heler, 2015; Wei, 2015). At this stage of the CRISPR response, Cas9 forms a complex with Casi and Cast, the two proteins that are involved in spacer acquisition in all CRISPR-Cas systems (Heler, 2015; Wei, 2015).

[0949] The Cas9 protein, combined with tracrRNA, has recently become the key tool for the new generation of genome editing and engineering methods (Gasiunas, 2013; Mali, 2013; Sampson, 2014; Cong, 2015). This utility of Cas9 in genome editing hinges on the fact that in Type II CRISPR-Cas systems, unlike other types of CRISPR-Cas systems, all the activities required for the target DNA recognition and cleavage are assembled within a single, albeit large, multidomain protein. This feature of Type II systems greatly facilitates the design of efficient tools for genome manipulation. Importantly, not all variants of Cas9 are equal. Most of the work so far has been done with Cas9 from Streptococcus pyogenes but other Cas9 species could offer substantial advantages. As a case in point, recent experiments with Ca.s9 from Staphylococcus aureus that is about 300 amino acids shorter than the S. pyogenes protein have allowed Cas9 packaging into the adeno-associated virus vector, resulting in a major enhancement of CRISPR-Cas utility for genome editing in vivo (Ran, 2015).

[0950] Type II CRISPR-Cas systems currently are classified into 3 subtypes (II-A, II-B and (Makarova., 2011) (Fonfara, 2014; Chylinski, 2013; Chylinski, 2014). In addition to the casl, cast and cas9 genes that are shared by all Type II loci, subtype II-A is characterized by an extra gene, csn2, that encodes an inactivated ATPase (Nam, 2011; Koo, 2012; Lee, 2012) that plays a still poorly characterized role in spacer acquisition (Barrangou, 2007; Arslan, 2013)(Heler, 2015). Subtype II-B systems lack csn2 but instead contains the cas4 gene that is otherwise typical of Type I systems and encodes a recB family 5′-3′ exonuclease that contributes to spacer acquisition by generating recombinogeneci DNA ends (Zhang, 2012)(Lemak, 2013; Lemak, 2014). The cast and cas2 genes of subtype II-B are most closely related to the respective proteins of Type I CRISPR-Cas systems which implies a recombinant origin of this Type II subtype (Chylinski, 2014).

[0951] Subtype II-C CRISPR-Cas systems are the minimal variety that consists only of the cas1, cas2 and cas9 genes (Chylinski, 2013; Koonin, 2013; Chylinski, 2014). Notably, however, it has been shown that in Campylobacter jejuni spacer acquisition by the Type II-C systems requires the participation of Cas4 encoded by a bacteriophage (Hooton, 2014). Another distinct feature of subtype II-C is the formation of some of the crRNAs by transcription involves transcription from internal alternative promoters as opposed to processing observed in all other experimentally characterized CRISPR-Cas systems (Zhang, 2013).

[0952] Recently, the existence of Type V CRISPR-Cas systems has been predicted by comparative analysis of bacterial genomes. These putative novel CRISPR-Cas systems are represented in several bacterial genomes, in particular those from the genus Francisella and one archaeon, Methanomethylophilus alvus (Vestergaard, 2014). All putative Type V loci encompass cas1, cas2, a distinct gene denoted cpf1 and a CRISPR array (Schunder, 2013)(Makarova, 2015). Cpf1 is a large protein (about 1300 amino acids) that contains a RuvC-like nuclease domain homologous to the corresponding domain of Cas9 along with a counterpart to the characteristic arginine-rich cluster of Cas9, However, Cpf1 lacks the HNH nuclease domain that is present in all Cas9 proteins, and the RuvC-like domain is contiguous in the Cpf1 sequence, in contrast to Cas9 where it contains long inserts including the HNH domain (Chylinski, 2014; Makarova, 2015). These major differences in the domain architectures of Cas9 and Cpf1 suggest that the Cpf1-contaning systems should be classified as a new type. The composition of the putative Type V systems implies that Cpf1 is a single-subunit effector complex, and accordingly, these systems are assigned to Class 2 CRISPR-Cas. Some of the putative Type V loci encode Cas4 and. accordingly resemble subtype II-B loci, whereas others lack Cas4 and thus are analogous to subtype II-C.

[0953] It has been shown that the closest homologs of Cas9 and Cpf1 proteins are TnpB proteins that are encoded in IS605 family transposons and contain the RuvC-like nuclease domain as well as a Zn-finger that has a counterpart in Cpf1. In addition, homologs of TnpB have been identified that contain a HNH domain inserted into the RuvC-like domain and show high sequence similarity to Cas9. The role of TnpB in transposons remains uncertain as it has been shown that this protein is not required for transposition.

[0954] Given the homology of Cas9 and Cpf1 to transposon-encoded proteins, Applicants hypothesized that Class 2 CRISPR-Cas systems could have evolved on multiple occasions as a result of recombination between a transposon and a cas1-cas2 locus. Accordingly, Applicants devised a simple computational strategy to identify genomic loci that could be candidates for novel variants of Class 2. Here Applicants describe the first application of this approach that resulted in the identification of three groups of such candidates two of which appear to be distinct subtypes of Type V whereas the third one seems to qualify at Type VI. The new variants of Class2 CRISPR-Cas systems are of obvious interest as potential tools for genome editing and expression regulation,

[0955] Database search strategy for detection of candidate novel Class 2 CRISPR-Cas loci. Applicants implemented a straightforward computational approach to identify candidate novel Class 2 CRISPR-Cas systems (FIG. 7. Pipeline). Because the vast majority of the CRISPR-Cas loci encompass a cas1 gene (Makarova, 2011; Makarova, 2015) and the Cas1 sequence is the most highly conserved one among all Cas proteins (Takeuchi, 2012), Applicants reasoned that casl is the best possible anchor to identify candidate new loci using translating PSI-BLAST search with Cas1 profiles. After detecting all contigs encoding Cas1 by searching the WGS (whole genome shotgun) and NT (nucleotide) databases at the NCBI, the protein-coding genes were predicted using GenemarkS within the 20 KB regions upstream and downstream of the cas1 gene. These predicted genes were annotated using the NCBI Conserved Domain Database (CDD) and Cas protein-specific profiles (Makarova et al., 2015, Nat Rev Microbiol. 2015, doi: 10.1038/nrmicro3569), and CRISPR arrays were predicted using the PILER-CR program. This procedure provided for assignment of the detected CRISPR-Cas loci to the known subtypes. Partial and/or unclassified candidate CRISPR-Cas loci containing large (>500 aa) proteins were selected as candidates for novel Class 2 systems given the characteristic presence of such large single-subunit effector proteins in Types II and V systems (Cas9 and Cpf1, respectively). All 63 candidate loci detected using these criteria (listed in the Table set forth in FIG. 40A-D) were analyzed on a case by case basis using PSI-BLAST and HHpred. The protein sequences encoded in the candidate loci were further used as queries to search metagenomic databases for additional homologs, and long contigs detected in these searches were analyzed as indicated above. This analysis pipeline yielded a total of 53 novel loci (some of the originally identified 63 candidate loci were discarded as spurious whereas several incomplete loci that lacked cas1 were added) with characteristic features of Class 2 CRISPR-Cas systems that could be classified into three distinct groups of loci based on the nature of the predicted effector proteins (see FIGS. 8A and 8B; FIGS. 9, 14 and 15; and FIGS. 41A-B, 42A-B, and 43A-B), Although bacteriophages infecting bacteria that harbor the newly discovered class 2 CRISPR-Cas systems are virtually unknown, for each of these systems, we detected spacers that matched phages or predicted prophages.

[0956] Using the computational strategy, the Applicants realised three new Class 2 CRISPR-Cas systems, namely C2c1 and C2c3, which are classified as subtypes of the previously described putative type V, and C2c2, which the Applicants assign to a new putative type VI on the strength of the presence of a novel predicted effector protein. The Applicants present multiple lines of evidence that these loci encode functional CRISPR-Cas systems. On the comparative genomic side, we identified phage-specific spacers for each of the three putative novel systems and also showed that the sets of spacers are completely different in closely related bacterial genomes suggestive of active, functioning immunity. Many of these new systems occur in bacterial genomes that encompass no other CRISPR-Cas loci, suggesting that type V and type VI systems can function autonomously. Furthermore, even when other CRISPR-Cas systems were identified in the same genomes, the associated repeat structures were clearly distinct from those in types V and VI, suggestive of independent functionality.

[0957] Putative type V-B system. The first group of candidate loci, provisionally denoted C2c1 (Class 2 candidate 1), is represented in bacterial genomes from four major taxa, including Bacilli, Verrucomicrobia, alpha-proteobacteria and delta-proteobacteria (FIG. 8A-B “Organization of complete loci of Class 2 systems”; FIG. 41A-B). All C2c1 loci encode a Cas1-Cas4 fusion, Cas2, and the large protein that Applicants denote C2c1p, and typically, are adjacent to a CRISPR array (FIG. 9, C2c1 neighborhoods; FIG. 41A-B). In the phylogenetic tree of Cas1, the respective Cas1 proteins cluster with Type I-U system (FIGS. 10A and 10B, FIG. 10C-W, Cas1 tree), the only one in which the Cas1-Cas4 fusion is found. The lengths of the C2c1p proteins identified herein range from about 1100 to about 1500 amino acids, for example may consist of approximately 1200 amino acids, and HHpred search detected significant similarity between the C-terminal portion of the C2c1p proteins and a subset of TnpB proteins encoded in transposons of the IS605 family (FIGS. 13A and 13C). In contrast, no significant similarity was detected between C2c1p and Cas9 or Cpf1 that are similar to other groups of TnpB proteins (Chylinski, 2014)(Makarova, 2015; Makarova, 2015). Thus, the domain architecture of C2c1p is similar to that of Cpf1 and distinct from that of Cas9 (FIG. 13A) although all three Cas proteins seem to have evolved from the TnpB family (FIG. 11 “Domain organization of class 2 families”; FIG. 13A). The N-terminal region of C2c1p shows no significant similarity to other proteins. Secondary structure prediction indicates that this region adopts mostly alpha-helical conformation. The two segments of similarity with TnpB encompass the three catalytic motifs of the RuvC-like nuclease, with the diagnostic D.E.D signature of catalytic amino acid residues (Aravind et al., 2000, Nucleic Acids Res, vol. 28, 3417-3432) (FIG. 12, “TnpB homology regions in Class 2 proteins”); the region corresponding to the bridge helix (also known as arginine-rich cluster) that in Cas9 protein is involved in crRNA-binding; and a small region that appears to be the counterpart to the Zn finger of TnpB (however, the Zn-binding cysteine residues are missing in the majority of C2c1 proteins indicating that such proteins do not bind zinc; moreover, C2c1 contain multiple insertions and deletions in this region suggestive of functional divergence (FIG. 13A, FIG. 13D-H, FIG. 13I). The conservation of the catalytic residues (FIG. 13A) strongly suggests that the RuvC homology domains of all these proteins are active nucleases. The N-terminal regions of C2c1 show no significant similarity to any known proteins. Secondary structure predictions indicate that the N-terminal regions of C2c1 proteins adopt a mixed α/β conformation (FIG. 13D-H, FIG. 13I). The similarity of the domain architectures of C2c1p and Cpf1 suggests that the C2c1 loci are best classified as Subtype V-B in which case the Cpf1-encoding loci become Subtype V-A.

[0958] Despite similarity of cast genes associated with this system, the CRISPR repeats in the respective arrays are highly heterogeneous although all of them are 36-37 bp long and can be classified as unstructured (folding energy, ΔG, is −0.5-4.5 kcal/mole whereas highly palindromic CRISPR have ΔG below −7 kcal/mole). According to the CRISPRmap (Lange, 2013) classification scheme, several of the Subtype V-B repeats share some sequence or structural similarity with Type II repeats (FIG. 41A-T). However, most of the repeats could not be classified into the known sequence or structure families and were variously assigned to 4 of the 6 superclasses (FIG. 41A-T).

[0959] Considering the possibility that the putative Subtype V-B CRISPR-Cas systems are mechanistically analogous to Type II systems, Applicants attempted to identify the tracrRNA in the respective genomic loci

[0960] Comparison of the spacers from the Type V-B CRISPR arrays to the non-redundant nucleotide sequence database identified several matches to various bacterial genomes. In particular, one of the spacers from Alicyclobacillus acidoterrestris and one of the spacers from Brevihacillus agri matched uncharacterized genes within predicted prophages integrated into the respective bacterial genomes (FIG. 41A-L).

[0961] Putative type VI systems. The second group of candidate CRISPR-Cas loci, denoted C2c2 (Class 2 candidate 2), was identified in genomes from 5 major bacterial taxa, including alpha-proteobacteria, Bacilli, Clostridia, Fusobacteria and Bacteroidetes (FIG. 8A-B “Organization of complete loci of Class 2 systems”; FIG. 42A-B).A number of C2c2 loci encompass cas1 and cas2 genes, along with a large protein (C2c2p) that shows no sequence similarity to C2c1, Cpf1, or Cas9, and a CRISPR array; however, unlike C2c1, C2c2p is often encoded next to a CRISPR array but not casl-cas2 (FIG. 15, C2c2 neighborhoods; FIG. 42A-B). Although under our computational strategy, the originally identified C2c2 loci encompassed the cas1 and cas2 genes, subsequent searches showed that the majority of such loci may consist only of the C2c2 gene and a CRISPR array. Such apparently incomplete loci could either encode defective CRISPR-Cas systems or might function with the adaptation module encoded elsewhere in the genome, as has been observed for some type III systems (Majumdar et al., 2015, RNA, vol. 21, 1147-1158). In the phylogenetic tree of Cas1, the Cas1 proteins from the C2c2 loci are distributed among two clades. The first clade includes Cas1 from Clostridia and is located within the Type II subtree along with a small Type III-A branch (FIGS. 10A and 10B. FIG. 10C-V, Cas1 tree). The second clade consists of Cas1 proteins from C2c2 loci of Leptotrichia and is lodged. inside a mixed branch that mostly contains Cas1 proteins from Type III-A CRISPR-Cas systems. Database searches using HHpred and PSI-BLAST detected no sequence similarity between C2c2p and other proteins. However, inspection of multiple alignments of C2c2p protein sequences led to the identification of two strictly conserved RxxxxH motifs that are characteristic of HEPN (Higher Eukaryotes and Prokaryotes Nucleotide-binding) domains (Anantharaman et al., 2013, Biol Direct, vol. 8, 15; Grynberg et al., 2003, Trends in biochemical sciences, vol. 28, 224-226) (FIG. 11 and FIG. 13B, FIG. 13J-N). Secondary structure predictions indicates that these motifs are located within structural contexts compatible with the HEPN domain structure as is the overall secondary structure prediction for the respective portions of C2c2p. The HEPN domains are small (˜150 aa) alpha helical domains with diverse sequences but highly conserved catalytic motifs that have been shown or predicted to possess RNAse activity and are often associated with various defense systems (Anantharaman, 2013) (FIG. 13B and 16, HEPN RxxxxH motif in C2c2 family). The sequences of HEPN domains show little conservation except for the catalytic RxxxxH motif. While the sequences of the two putative HEPN domains of C2c2 show little similarity to other HEPN domains except for the catalytic RxxxxH motifs, the domain identity is strongly supported by secondary structure predictions that indicate that each motif is located within compatible structural contexts (FIG. 13B, FIG. 13J-N). Furthermore, the predicted secondary structure of the entire sequence for each putative domain is also consistent with the HEPN fold (FIG. 13J-N). Thus, it appears likely that C2c2p contains two active HEPN domains. The HEPN domain is not new to CRISPR-Cas systems as it is often associated with the CARF (CRISPR-Associ ated Rossmann Fold) domain in Csm6 and Csx1 proteins that are present in many Type III CRISPR-Cas systems (Makarova, 2014). These proteins do not belong to either the adaptation modules or effector complexes but are thought to perform some accessory, still uncharacterized functions in cognate CRISPR, more particularly they appear to be components of the associated immunity module that is present in the majority of CRISPR-Cas systems and is implicated in programmed cell death as well as regulatory functions during the CRISPR response (Koonin, 2013; Makarova, 2012; Makarova, 2013). However, C2c2p differs from Csm6 and Csx1 in that this much larger protein is the only common protein encoded in the C2c2 loci, except for Cas1 and Cas2. Thus, it appears likely that C2c2p is the effector of these putative novel CRISPR-Cas systems and the HEPN domains are the catalytic moieties thereof. Outside of the predicted HEPN domains, the C2c2p sequence showed no detectable similarity to other proteins and is predicted to adopt a mixed alpha/beta secondary structure without discernible similarity to any known protein folds (FIG. 13J-N).

[0962] The CRISPR arrays in the C2c2 loci are highly heterogeneous, with the length of 35 to 39 bp, and unstructured (folding energy of −0.9 to 4.7 kcal/mole). According to CRISPRmap (Lange, 2013), these CRISPR do not belong to any of the established structural classes and are assigned to 3 of the 6 supercla.sses. Only the CRISPR from Listeria seeligeri was assigned to the sequence family 24 that is usually associated with Type II-C systems (FIG. 42A-L).

[0963] Spacer analysis of the C2c2 loci identified one 30 nucleotide region identical to a genomic sequence from Listeria weihenstephanensis and two imperfect hits to bacteriophage genomes, in particular, a spacer from Listeria weihenstephanensis matched the tail gene of a Listeria bacteriophage (FIG. 42A-L).

[0964] Given the unique predicted effector complex of C2c2, these systems seem to qualify as a putative Type VI CRISPR-Cas. Furthermore, taking into account that all experimentally characterized and enzymatically active HEPN domains are RNAses, Type VI systems are likely to act at the level of RNA, such as mRNA.

[0965] Putative type V-C systems. The third group of candidate loci includes solely metagenomic sequences and thus could not be assigned to specific taxa. These loci encompass only two protein-coding genes that encode Cas1 and a large protein denoted C2c3 (Class 2 candidate 3) (FIG. 8A “Organization of complete loci of Class 2 systems”; FIG. 14, C2c3 neighbourhoods, FIG. 43A-B). The C2c3 proteins are in the same size range as Cpf1 and C2c1, and similarly contain a TnpB-homologous domain at their C-termini which, unlike the respective domain of C2c1, showed a limited but significant similarity to Cpf1 (FIGS. 13A and 13C). The TnpB homology regions of C2c3 contain the three catalytic motifs of the RuvC-like nuclease, with the diagnostic D.E.D triad of catalytic amino acid residues (Aravind et al., 2000, supra), the region corresponding to the bridge helix (also known as the arginine-rich cluster), which is involved in crRNA-binding in Cas9, and a small region that appears to be the counterpart to the Zn finger of TnpB (the Zn-binding cysteine residues are conserved in C2c3). The conservation of the catalytic residues strongly suggests that the RuvC homology domains of all these proteins are active nucleases. The N-terminal regions of C2c1 and C2c3 show no significant similarity to each other or any known proteins. Secondary structure predictions indicate that the N-terminal regions of C2c3 proteins adopt a mixed α/β conformation. Thus, the overall domain architectures of C2c1 and C2c3, and in particular the organization of the RuvC domain, are similar to that of Cpf1 but distinct from that of Cas9. This suggests that the C2c1 and C2c3 loci are best classified as subtypes V-B (see above) and V-C, respectively, with Cpf1-encoding loci now designated subtype V-A.

[0966] Among the c2c3 loci, only one contains a CRISPR array with unusually short, 17-18 nt spacers. The repeats in this array are 25 bp long and appear to be unstructured with folding energy of −1.6 kcal/mol (FIG. 43A-F).

[0967] Spacers from the only C2c3 contig containing a CRISPR array are too short to produce statistically significant hits. Nevertheless, several matches to sequences from predicted prophages were identified (FIG. 43A-F).

[0968] The subsets of the TnpB proteins with significant similarity to the one known (Cas9) and three herein disclosed putative Class 2 effectors (Cpf1, C2c1 and C2c3) did not overlap (FIGS. 13A and 13C). Although the sequence divergence among the TnpB-like domains is too high to allow reliable phylogenetic analysis, these findings suggest that the four currently identified large effector proteins of Class 2, Cas9, Cpf1, C2c1 and C2c3, have evolved independently from genes of distinct transposable elements.

[0969] Although the majority of spacers in the new CRISPR-Cas loci described herein were not significantly similar to any available sequences, the existence of spacers matching phage genomes implies that these loci may encode active, functional adaptive immunity systems. The small fraction of phage-specific spacers is typical of CRISPR-Cas systems and is most likely indicative of their dynamic evolution and the small fraction of virus diversity that is represented in the current sequence databases. This interpretation is compatible with the observation that closely related bacterial strains encoding homologous CRISPR-Cas loci typically contain unrelated collections of spacers, as exemplified by the C2c2 loci from Listeria weihenstephanensis and Listeria newyorkensis (FIG. 45A-C).

[0970] Applicants applied a simple, straightforward computational strategy to predict new Class 2 CRISPR-cas systems. The previously described class 2 systems, namely Type II and the putative Type V, consisted of the cas1 and cas2 genes (and in some cases also cas4) comprising the adaptation module and a single large protein that comprises the effector module. Therefore, Applicants surmised that any genomic locus containing cas1 and a large protein could be a potential candidate for a novel Class 2 system that merits detailed investigation. Such analysis using sensitive methods for protein sequence comparison led to the identification of three strong candidates two of which are distinct subtypes of the previously described putative Type V (subtypes V-B and V-C) whereas the third one qualifies as a new putative Type VI, on the strength of the presence of a novel predicted effector protein. Many of these new systems occur in bacterial genomes that encompass no other CRISPR-Cas loci (FIG. 44A-E) suggesting that Type V and Type VI systems can function autonomously. The herein disclosed candidate loci were validated through functional assays which revealed the expression and processing of the respective CRISPR arrays, yielding mature crRNAs, identification of putative tracrRNA (where present), demonstration of interference when expressed in E. coli, determination of the protospacer adjacent motif (PAM), and interrogation of the minimal components necessary for lysate cleavage.

[0971] Type V systems encode predicted effector proteins that resemble Cas9 in their overall domain architecture, but in contrast to Cas9, the RuvC-like domains of Cpf1, C2c1 and C2c3 are contiguous in the protein sequence, lacking the inserts characteristic of Cas9, particularly the HNH nuclease domain. The presence of one instead of two nuclease domains indicates that type V effector proteins mechanistically differ from Cas9 in which the HNH and RuvC domains are responsible for the cleavage of the complementary and non-complementary strands of the target DNA, respectively (Chen et al., 2014, The Journal of biological chemistry, vol. 289, 13284-13294; Gasiunas et al., 2012, Proceedings of the National Academy of Sciences of the United States of America, vol. 109, E2579-2586; Jinek et al., 2012, Science, vol. 337, 816-821). The predicted type V effector proteins might form dimers in which the two RuvC-like domains would cleave the opposite strands of the target molecule.

[0972] The putative type VI CRISPR-Cas systems seem to rely on a novel effector protein that contains two predicted HEPN domains that, similar to the previously characterized HEPN domains, could possess RNAse activity, suggesting that type VI systems might target and cleave mRNA. Previously, mRNA targeting has been reported for certain type III CRISPR-Cas systems (Hale et al., 2014, Genes Dev, vol. 28, 2432-2443; Hale et al., 2009, Cell, vol. 139, 945-956; Peng et at, 2015, Nucleic acids research, vol. 43, 406-417). An alternative possibility is that C2c2 is the first DNAse in the HEPN superfamily, perhaps with the two HEPN domains each cleaving one DNA strand. Thus, it might be possible to develop C2c1 and C2c2 into genome editing tools with different classes of targets.

[0973] To validate the functionality of these Class2 CRISPR-Cas systems, the Applicants showed that two C2c1 CRISPR arrays are expressed, processed into mature crRNAs, and capable of interference when expressed in E. coli. These experiments revealed several characteristics of the C2c1 locus including: (i) a 5′ processed DR on the crRNA, (ii) a 5′ PAM, and (iii) the presence of a short RNA with repeat-anti-repeat homology to the processed 5′ DR, i.e., a putative tra.crRNA. The discovery of a 5′ processed DR and 5′ PAM supports the scenario in which C2c1 is derived from Class 1 systems because these systems show evidence of 5′ repeat processing (type I and III) and a 5′ PAM (type I) (Mojica et al., 2009, Microbiology, vol. 155, 733-740; Makarova. et al., 2011, Nat Rev Microbioln vol. 9, 467-477). Notably, the AT-rich PAM identified here for C2c1 is in contrast to the GC-rich PAMs of the other well-characterized Class 2 system (type II). For C2c1 loci experimentally characterized here, the Applicants identified crRNAs that are processed to a length that preserves the binding and co-folding with putative tracrRNAs, suggesting that tracrRNAs may be involved in and possibly required for complex formation. We then used expression of C2c1 in a human cell culture to experimentally test that under those circumstances a tracrRNA was involved in and necessary for the in vitro cleavage of target DNA by the particular C2c1 nuclease tested.

[0974] The Applicants also showed that when the C2c2 locus from L. seeligeri is expressed in E. coli, it is processed into crRNAs with a 29-nt 5′ DR; similar results were obtained for the C2c2 locus of L. shahii. In this case, the degenerate repeat is at the beginning of the array, rather than at the end, as is typical for most CRISPR arays, and the array and cas genes are transcribed co-directionally. The Applicants did not detect the putative tracrRNA in the C2c2 RNA-seq data. However, the predicted secondary structure of the 29-nt DR shows a stable hairpin handle which could be potentially important for complex formation with the C2c2 effector protein.

[0975] FIG. 94 demonstrates that processing of the C2c2 array in E. coli requires the C2c2 protein, as evaluated with in vitro transcribed spacer arrays incubated with C2c2 protein.

[0976] Combined with the results of previous analyses, (Chylinski, 2014; Makarova, 2011), the identification of the novel Class2 CRISPR-Cas systems reveals the dominant theme in the evolution of Class 2 CRISPR-Cas systems. The effector proteins of two of the three types within this class appear to have evolved from the pool of transposable elements that encode TnpB proteins containing the RuvC-like domain. The sequences of the RuvC-like domains of TnpB and the homologous domains of the Class 2 effector proteins are too diverged for reliable phylogenetic analysis. Nevertheless, for Cas9, the effector protein of Type II systems, the specific ancestral group seems to be readily identifiable, namely a family of TnpB-like proteins, particularly abundant in Cyanobacteria, that show a relatively high sequence similarity to Cas9 and share with it the entire domain architecture, namely the RuvC-like and HNH nuclease domains and the arginine-rich bridge helix (Chylinski, 2014) (FIG. 11, FIGS. 13A and 13B, “Domain organization of class 2 families”; FIG. 12, FIGS. 13A and 13B, “TnpB homology regions in Class 2 proteins”). Unlike Cas9, it was impossible to trace Cpf1, C2c1, and C2c3 to a specific TnpB family; despite the conservation of all motifs centered at the catalytic residues of the RuvC-like nucleases, these proteins show only a limited similarity to generic profiles of the TnpB. However, given that C2c1p shows no detectable sequence similarity with Cpf1, that Cpf1, C2c1,; and C2c3 contain distinct insertions between the RuvC-motifs and clearly unrelated N-terminal regions, it appears most likely that Cpf1, C2c1, and C2c3 originated independently from different families within the pool of TnpB-encoding elements (FIG. 13C).

[0977] It is intriguing that the TnpB proteins seem to be “predesigned” for utilization in Class 2 CRISPR-Cas effector complexes such that they apparently have been recruited on multiple different occasions. Conceivably, such utility of TnpB proteins has to do with their predicted ability to cut a single-stranded DNA while bound to a RNA molecule via the R-rich bridge helix that in Cas9 has been shown to bind crRNA (Jinek, 2014; Nishitnasu, 2014; Anders et al., 2014, Nature, vol. 513, 569-573). The functions of TnpB in the life cycles of the respective transposons are poorly understood. These proteins are not required for transposition, and in one case, a TnpB protein has been shown to down-regulate transposition (Pasternak, 2013) but their mechanism of action remains unknown. Experimental study of TnpB is likely to shed light on the mechanistic aspects of the Class 2 CRISPR-Cas systems. It should be noted that the mechanisms of Cpf1 and C2c1 could be similar to each other but are bound to substantially differ from that of Cas9 because the former two proteins lack the HNH domain that in Cas9 is responsible for nicking one of the target DNA strands (Gasiunas, 2012)(Jinek, 2012)(Chen, 2014). Accordingly, exploitation of Cpf1 and C2c1 might bring additional genome editing possibilities.

[0978] In evolutionary terms, it is striking that Class 2 CRISPR-Cas appear to be completely derived from different transposable elements given the recent evidence on the likely origin of cas1 genes from a distinct transposon family (Koonin, 2015; Krupovic, 2014). Furthermore, the likely independent origin of the effector proteins from different families of TnpB, along with the different phylogenetic affinities of the respective cast proteins, strongly suggest that Class 2 systems have evolved on multiple occasions through the combination of various adaptation modules and transposon-derived nucleases giving rise to effector proteins. This mode of evolution appears to be the ultimate manifestation of the modularity that is characteristic of CRISPR-Cas evolution (Makarova, 2015), with the implication that additional combinations of adaptation and effector module are likely to exist in nature.

[0979] The putative Type VI CRISPR-Cas systems encompass a predicted novel effector protein that contains two predicted HEPN domain that are likely to possess RNAse activity. The HEPN domains are not parts of the effector complexes in other CRISPR-Cas systems but are involved in a variety of defense functions including a predicted ancillary role in various CRISPR-Cas systems Anantharaman, 2013)(Makarova, 2015). The presence of the HEPN domains as the catalytic moiety of the predicted effector module implies that the Type VI systems target and cleave mRNA. Previously, mRNA targeting has been reported for certain Type III CRISPR-Cas systems (Hale, 2014; Hale, 2009)(Peng, 2015). Although HEPN domains so far have not been detected in bona fide transposable elements, they are characterized by high horizontal mobility and are integral to mobile elements such as toxin-antitoxin units (Anantharaman, 2013). Thus, the putative Type VI systems seem to fit the general paradigm of the modular evolution of Class 2 CRISPR-Cas from mobile components, and additional variants and new types are expected to be discovered by analysis of genomic and metagenomics data. Given that the C2c2 protein is unrelated to the other Class 2 effectors (which all contain RuvC-like domains, even if distantly related ones), the discovery of type VI can be considered to corroborate the case for the independent origins of different Class 2 variants.

[0980] In view of the emerging scenario of the evolution of Class 2 systems from mobile elements, it seems instructive to examine the overall evolution of CRISPR-Cas loci and in particular the contributions of mobile elements to this process (FIG. 53). The ancestral adaptive immunity system most likely originated via the insertion of a casposon (a Cas1-encoding transposon) adjacent to a locus that encoded a primitive innate immunity system Koonin and Krupovic, 2015, Nature reviews Genetics, vol. 16, 184-192; Krupovic et al., 2014, BMC Biology, vol. 12, 36). An additional important contribution was the incorporation of a toxin-antitoxin system that delivered the cast gene and might have occurred either in the ancestral casposon or in the evolving adaptive immunity locus (FIG. 51).

[0981] Given the extremely wide spread of Class I systems in archaea and bacteria and the proliferation of the ancient RRM (RNA Recognition Motif) domains in them, there seems to be little doubt that the ancestral system was of Class 1 (FIG. 51). Most likely, the ancestral architecture resembled the extant type III and in that it encompassed an enzymatically active Cas10 protein (Makarova et al., 2011, Biol Direct, vol. 6, 38; Makarova et al., 2013, Biochem Soc Trans, vol. 41, 1392-1400). The Cas10 protein is a homolog of family B DNA polymerases and nucleotide cyclases of the GGDEF family (“GGDEF” disclosed as SEQ ID NO: 201) that shows significant sequence similarity to these enzymes and retains all the catalytic amino acid residues (Makarova et al., 2011, Biol Direct, vol. 6, 38; Makarova et al., 2006, Biol Direct, vol. 1, 7), Structural analysis has confirmed the presence of the polymerase-cyclase-like domain in Cas10 and additionally revealed a second, degenerate and apparently inactive domain of this family (Khachatryan et al., 2015, Phys Rev Lett, vol. 114, 051801; Shao et al., 2013, Structure, vol. 21, 376-384; Zhu and Ye, 2012, FEBS Lett, vol. 586, 939-945). The exact nature of the catalytic activity of Cas10 remains unclear but it has been shown that the catalytic residues of the polymerase-cyclase-like domain are essential for the target DNA cleavage (Samai et al., 2015, Cell, vol. 161, 1164-1174). The Cas8 proteins present in type I CRISPR-Cas systems are similar in size to Cas 10 and occupy equivalent positions in the effector complexes (Jackson et al., 2014, Science, vol. 345, 1473-1479; Jackson and Wiedenheft, 2015, Mol Cell, vol. 58, 722-728; Staals et al., 2014, Molecular cell, vol. 56, 518-530), suggestive of an evolutionary relationship between the large subunits of the type III and type I effector complexes. More specifically, the Cas8 proteins that have highly diverged in sequence between type I subtypes could be catalytically inactive derivatives of Cas10 (Makarova et al., 2011, Biol Direct, vol. 6, 38; Makarova et al., 2015). This scenario suggests a plausible directionality of evolution, from type III-like ancestral Class I system to the type I systems. The divergence of the type III and type I systems could have been precipitated by the acquisition of the Cas3 helicase by the emerging type I (FIG. 53). The different types and subtypes of Class 2 then evolved via multiple substitutions of the gene block encoding the Class 1 effector complexes via insertion of transposable elements encoding various nucleases (FIG. 53). This particular directionality of evolution follows from the observation that the adaptation modules of different Class 2 variants derive from different Class 1 types (FIGS. 10A and 10B).

[0982] The Class 2 CRISPR-Cas systems appear to have been completely derived from different mobile elements. Specifically, there seem to have been at least two (in subtype V-C) but typically, three or, in the case of type II, even four mobile element contributors: (i) the ancestral casposon, (ii) the toxin-antitoxin module that gave rise to Cast, (iii) a transposable element, in many cases a TnpB-encoding one, that was the ancestor of the Class 2 effector complex, and (iv) in the case of type II, the HNH nuclease could have been donated to the ancestral transposon by a group I or group II self-splicing intron (Stoddard, 2005, Q Rev Biophys, vol. 38, 49-95) (FIG. 53). The putative type V-C loci described here encode the ultimate minimalistic CRISPR-Cas system, the only currently identified one that lacks Cas2; conceivably, the highly diverged subtype V-C Cas1 proteins are capable of forming the adaptation complex on their own, without the accessory Cas2 subunit. The multiple originations of Class 2 systems from mobile elements present the ultimate manifestation of the modularity that is characteristic of the evolution of CRISPR-Cas (Makarova et al., 2015).

[0983] The demonstration that different varieties of Class 2 CRISPR-Cas systems independently evolved from different transposable elements implies that additional variants and new types remain to be identified. Although most if not all of the new CRISPR-Cas systems are expected to be rare, they could employ novel strategies and molecular mechanisms and could provide a major resource for new, versatile applications in genome engineering and biotechnology.

[0984] Modular evolution is a key feature of CRISPR-Cas systems. This mode of evolution appears to be most pronounced in Class 2 systems that evolve through the combination of adaptation modules from various other CRISPR-Cas systems with effector proteins that seem to be recruited from mobile elements on multiple independent occasions. Given the extreme diversity of mobile elements in bacteria, it appears likely that effector modules of Class 2 CRISPR-Cas systems are highly diverse as well. Here Applicants employed a simple computational approach to delineate three new variants of CRISPR-Cas systems but many more are likely to exist bacterial genomes that have not yet been sequenced. Although most if not all of these new CRISPR-Cas systems are expected to be rare, they could employ novel strategies and molecular mechanisms and would provide a major resource for new applications in genome engineering and biotechnology.

[0985] TBLASTN program with the E-value cut-off of 0.01 and low complexity filtering turned off parameters was used to search with Cas1 profile (Makarova et al., 2015) as a query against NCBI WGS database. Sequences of contigs or complete genome partitions where Cas1 hit has been identified were retrieved from the same database. The region around the Cas1 gene (the region 20 kb from the start of the Cas1 gene and 20 kb from the end of the Cas1 gene) was extracted and translated using GeneMarkS (Besemer et al., 2001, supra). Predicted proteins from each Cas1-encoding region were searched against a collection of profiles from CDD database (Marchler-Bauer, 2009) and specific Cas protein profiles (Makarova et al., 2015) using the RPS-BLAST program (Marchler-Bauer et al., 2002, Nucleic Acids Res, vol. 30, 281-283). Procedure to identify completeness of CRISPR loci and to classify CRISPR-Cas systems into the existing types and subtypes (Makarova et al., 2015) developed previously has been applied to each locus.

[0986] CRISPRmap (Lange, 2013) was Used for Repeat Classification.

[0987] Partial and/or unclassified loci that encompassed proteins larger than 500 amino acids were analyzed on a case-by-case basis. Specifically, each predicted protein encoded in these loci was searched using iterative profile searches with the PSI-BLAST (Altschul, 1997), and composition based-statistics and low complexity filtering turned off, to search for distantly similar sequences against NCBI's non-redundant (NR) protein sequence database. Each identified non-redundant protein was searched against WGS database using the TBLAST program (Altschul, 1997). TheHHpred program was used with default parameters to identify remote sequence similarity (Soding, 2005) using as the queries all proteins identified in the BLAST searches. Multiple sequence alignments were constructed using MUSCLE (Edgar, 2004) and MAFFT (Katoh and Standley, 2013, Mol Biol Evol, vol. 30, 772-780). Phylogenetic analysis was performed using the FastTree program with the WAG evolutionary model and the discrete gamma model with 20 rate categories (Price et al., 2010, PLoS One, vol. 5, e9490), Protein secondary structure was predicted using Jpred 4 (Drozdetskiy, 2015).

[0988] CRISPR repeats were identified using PILER-CR (Edgar, 2007, supra) or, for degenerate repeats, CRISPRfinder (Grissa et al., 2007, Nucleic Acids Res, vol. 35, W52-57). The Mfold program (Zuker, 2003, Nucleic Acids Res, vol. 31, 3406-3415) was used to identify the most stable structure for the repeat sequences.

[0989] The spacer sequences were searched against the NCBI nucleotide NR and WGS databases using MEGABLAST (Morgulis et al., 2008, Bioinformatics, vol. 24, 1757-1764) with default parameters except that the word size was set at 20.

[0990] Chosen Gene Candidates

Gene ID: A; Gene Type: C2C1; Organism: 5. Opitutaceae bacterium TAV5; Spacer
Length-mode (range): 34 (33 to 37); DR1:
GCCGCAGCGAAUGCCGUUUCACGAAUCGUCAGGCGG (SEQ ID NO: 27); DR2: none;
tracrRNA1:
GCUGGAGACGUUUUUUGAAACGGCGAGUGCUGCGGAUAGCGAGUUUCUCUUGGG
GAGGCGCUCGCGGCCACUUUU (SEQ ID NO: 28); tracrRNA2: none; Protein Sequence:
MSLNRIYQGRVAAVETGTALAKGNVEWMPAAGGDEVLWQHHELFQAAINYYLVALL
ALADK1WPVLGPLISQMDNPQSPYHVWGSFRRQGRQRTGLSQAVAPYTTPGNNAPTLD
EVFRSILAGNPTDRATLDAALMQLLKACDGAGAIQQEGRSYWPKFCDPDSTANFAGDP
AMLRREQHRLLLPQVLHDPAITHDSPALGSFDTYSIATPDTRTPQLTGPKARARLEQAIT
LWRVRLPESAADFDRLASSLKKIPDDDSRLNLQGYVGSSAKGEVQARLFALLLFRHLER
SSFTLGLLRSATPPPKNAETPPPAGVPLPAASAADPVRIARGKRSFVFRAFTSLPCWHGG
DNIHPTWKSFDIAAFKYALTVINQIEEKTKERQKECAELETDFDYMHGRLAKIPVKYTTG
EAEPPPILANDLRIPLLRELLQNIKVDTALTDGEAVSYGLQRRTIRGFRELRRIWRGHAPA
GTVFSSELKEKLAGELRQFQTDNSTTIGSVQLFNELIQNPKYWPIWQAPDVETARQWAD
AGFADDPLAALVQEAELQEDIDALKAPVKLTPADPEYSRRQYDFNAVSKFGAGSRSAN
RHEPGQTERGHNTFTTEIAARNAADGNRWRATHVRIHYSAPRLLRDGLRRPDTDGNEA
LEAVPWLQPMMEALAPLPTLPQDLTGMPVFLMPDVTLSGERRILLNLPVTLEPAALVEQ
LGNAGRWQNQFFGSREDPFALRWPADGAVKTAKGKTHIPWHQDRDHFTVLGVDLGTR
DAGALALLNVTAQKPAKPVHRIIGEADGRTWYASLADARMIRLPGEDARLFVRGKLVQ
EPYGERGRNASLLEWEDARNIILRLGQNPDELLGADPRRHSYPEINDKLLVALRRAQAR
LARLQNRSWRLRDLAESDKALDEIHAERAGEKPSPLPPLARDDA1KSTDEALLSQRDIIR
RSFVQIANLILPLRGRRWEWRPHVEVPDCHILAQSDPGTDDTKRLVAGQRGISHERIEQIE
ELRRRCQSLNRALRHKPGERPVLGRPAKGEEIADPCPALLEKINRLRDQRVDQTAHAILA
AALGVRLRAPSKDRAERRHRDIHGEYERFRAPADFVVIENLSRYLSSQDRARSENTRLM
QWCHRQIVQKLRQirETYGIPVLAVPAAYSSRFSSRDGSAGFRAVHLTPDHRHRMPWS
RILARLKAHEEDGKRLEKTVLDEARAVRGLFDRLDRFNAGHVPGKPWRTLLAPLPGGP
VFVPLGDATPMQADLNAAINIALRGIAAPDRHDIHHRLRAENKKRILSLRLGTQREKAR
WPGGAPAVTLSTPNNGASPEDSDALPERVSNLFVDIAGVANFERVTIEGVSQKFATGRG
LWASVKQRAWNRVARLNETVTDNNRNEEEDDIPM (SEQ ID NO: 29)
Gene ID: B; Gene Type: C2C1; Organism:
7. Bacillus thermoamylovorans strain B4166; Spacer Length-mode
(range): 37 (35-38); DR1:
GUCCAAGAAAAAAGAAAUGAUACGAGGCAUUAGCAC (SEQ ID NO: 30); DR2: none;
tracrRNA1:
CUGGACGAUGUCUCUUUUAUUUCUUUUUUCUUGGAUCUGAGUACGAGCACCCAC
AUUGGACAUUUCGCAUGGUGGGUGCUCGUACUAUAGGUAAAACAAACCUUUUU
(SEQ ID NO: 31); tracrRNA2: none; Protein Sequence:
MATRSFILKIEPNEEVKKGLWKTHEVLNHGIAYYMNILKLIRQEAIYEHHEQDPKNPKK
VSKAEIQAELWDFVLKMQKCNSFTHEVDKDVVFNILRELYEELVPSSVEKKGEANQLSN
KFLYPLVDPNSQSGKGTASSGRKPRWYNLKIAGDPSWEEEKICKWEEDKKKDPLAKILG
KLAEYGLIPLFIPFTDSNEPIVKEIKWMEKSRNQSVRRLDKDMFIQALERFLSWESWNLK
VKEEYEKVEKEHKTLEERIKEDIQAFICSLEQYEKERQEQLLRDTLNTNEYRLSKRGLRG
WREIIQKWLKMDENEPSEKYLEVFKDYQRKHPREAGDYSVYEFLSKKENHFIRWNHPE
YPYLYATFCEIDKKKKDAKQQATFTLADPINHPLWVRFEERSGSNLNKYRILTEQLHTE
KLKKKLTVQU5RLIYPTESGGWEEKGKVDIVLLPSRQFYNQIFLDIEEKGKHAFTYKDES
IKFPLKGTLGGARVQFDRDHLRRYPHKVESGNVGRIYFNMTVNIEPTESPVSKSLKIHRD
DFPKFVNFKPKELTEWIKDSKGKKLKSGIESLEIGLRVMSIDLGQRQAAAASIFEVVDQK
PDIEGKLFFPIKGTELYAVHRASFNIKLPGETLVKSREVLRKAREDNLKLMNQKLNFLRN
VLHFQQFEDITEREKRVTKWISRQENSDVPLVYQDELIQIRELMYKPYKDWVAFLKQLH
KRLEVEIGKEVKHWRKSLSDGRKGLYGISLKNIDEIDRTRKFLLRWSLRPTEPGEVRRLE
PGQRFAIDQLNHLNALKEDRLKKMANTIIMHALGYCYDVRKKKWQAKNPACQIILFED
LSNYNPYEERSRFENSKLMKWSRREIPRQVALQGEIYGLQVGEVGAQFSSRFHAKTGSP
GIRCSVVTKEKLQDNRFFKNLQREGRLTLDKIAVLKEGDLYPDKGGEKFISLSKDRKLVT
THADINAAQNLQKRFWTRTHGFYKVYCKAYQVDGQTVYIPESKDQKQKIIEEFGEGYFI
LKDGVYBWGNAGKLKIKKGSSKQSSSELVDSDILKDSFDLASELKGEKLMLYRDPSGN
VFPSDKWMAAGVFFGKLERJLISKLTNQYSISTIEDDSSKQSM (SEQ ID NO: 32)
Gene ID: C; Gene Type: C2C1; Organism: 9. Bacillus sp. NSP2.1;'Spacer Length-
mode (range): 36 (35-42); DR1: GUUCGAAAGCUUAGUGGAAAGCUUCGUGGUUAGCAC
(SEQ ID NO: 33); DR2: none; tracrRNA1:
CACGGAUAAUCACGACUUUCCACUAAGCUUUCGAAUUUUAUGAUGCGAGCAUCCU
CUCAGGUCAAAAAA (SEQ ID NO: 34); tracrRNA2: none; Protein Sequence:
MAIRSIKLKLKTHTGPEAQNLRKGIWRTHRLLNEGVAYYMKMLLLFRQESTGERPKEEL
QEELICHIREQQQRNQADKNTQALPLDKALEALRQLYELLVPSSVGQSGDAQIISRKFLS
PLVDPNSEGGKGTSKAGAKITWQKKKEANDPTQQDYEKWKKRREEDPTASVITTLEE
YGIRPIFPLYTNTVTDIAWLPLQSNQFVRTWDRDMLQQAIERLLSWESWNKQQ
LKEKMAQLNEQLEGGQEWISLLEQYEENRERELRENMTAANDKYRITKRQMKGWNEL
YELWSTFPASASHEQYKEALKRVQQRLRGRFGDAHFFQYLMEEKNRLIWKGNPQRIHY
FVARNELTKRLEEAKQSATMTLPNARKHPLWVRFDARGGNLQDYYLTAEADKPRSRRF
VTFSQLIWPSESGWMEKKDVEVELALSRQFYQQVKLLKNDKGKQKIEFKDKGSGSTFN
GHLGGAKLQLERGDLEKEEKNFEDGEIGSVYLNVVIDFEPLQEVKNGRVQAPYGQVLQ
LIRRPNEFPKVTTYKSEQLVEWIKASPQHSAGVESLASGFRVMSIDLGLRAAAATS1FSVE
ESSDKNAADFSYWIEGTPLVAVHQRSYMLRLPGEQVEKQVMEKRDERFQLHQRVKFQI
RVLAQIMRMANKQYGDRWDELDSLKQAVEQKKSPLDQTDRTFWEGIVCDLTKVLPRN
EADWEQAWQIHRKAEEYVGKAVQAWRKRFAADERKGIAGLSMWNIEELEGLRKLLIS
WSRRTRNPQEVNRFERGHTSHQRLLTHIQNVKEDRLKQLSHAIVMTALGYVYDERKQE
WCAEYPACQVILFENLSQYRSNLDRSTKENSTLMKWAHRSIPKYVHMQAEPYGIQIGDV
RAEYSSRFYAKTGTPGIRCKKVRGQDLQGRRFENLQKRLVNEQFLTEEQVKQLRPGDIV
PDDSGELFMTLTDGSGSKEWFLQADINAAHNLQKRFWQRYNELFKVSCRVIVRDEEE
YLVPKTKSVQAKLGKGLFVKKSDTAWKDVYVWDSQAKLKGKTTFTEESESPEQLEDFQ
EIIEEAEEAKGTYRTLFRDPSGVFFPESVWYPQKDFWGEVKRKLYGKLRERFLTKAR
(SEQ ID NO: 35)
Gene ID: D; Gene Type: C2C2; Organism:
4. Lachnospiraccae bacterium NK4A144 G619; Spacer Length-mode
(range): 35; DR1:
GUUUUGAGAAUAGCCCGACAUAGAGGGCAAUAGAC (SEQ ID NO: 36); DR2:
GUUAUGAAAACAGCCCGACAUAGAGGGCAAUAGACA (SEQ ID NO: 37); tracrRNA1:
none; tracrRNA2: none; Protein Sequence:
MKISKVDHTRMAVAKGNQHRRDEISGILYKDPTKTGSIDFDERFKKLNCSAKILYHVFN
GIAEGSNKYKLVIVDKVNNNLDRVLTTGKSYDRKSnDIDTVLRNVEKINAFDRJSTEEREQ
IIDDLLEIQLRKGLRKGKAGLREVLLIGAGVIVRTDKKQEIADFLEILDEDFNKTNQAKNI
KLSIENQGLVVSPVSRGEERIFDVSGAQKGKSSKKAQEKEALSAFLLDYADLDKNVRFE
YLRKIRRLLVLYFYVKNDDVMSLTEIPAEVNLEKDFDIWRDHEQRKEENGDFVGCPDILL
ADRDVKKSNSKQVKIAERQLRESIREKNIKRYRFSIKTIEKDDGTYFFANKQISVFWIHRI
ENAVERILGSINDIGAYRLRLGYLGEKVWKDILNFLTIKYIAVGKAVTQFAMDDLQEKD
RDIEPGKISENAVNGLTSFDYEQIKADEMLQREVAVNVAFAANNLARVTVDIPQNGEKE
DILLWNKSDIKKYKKNSKKGILKSILQFFGGASTWNMKMFEIAYHDQPGDYEENYLYDI
IQNYSLRNKSFHFKTYDHGDKNWNREIIGKMIHHDAERVISVEREKFHSNNLPMFYKDA
DLKKILDLLYSDYAGRASQVPAITVLVRKNFPEFLRKDMGYKVHFNNPEVENQWHSA
VYYLYKEIYYNLFLRDKEVKNLFYTSLKNIRSEVSDKKQKLASDDFASRCEEIEDRSLPEI
CQIIMTEYNAQNFGNRKVKSQRVIEKNKDIFRHYKMLLIKTLAGAFSLYLKQERFAFIGK
ATPIPYETTDVKNFLPEWKSGMYASFVEEIKNNLDLQEWYIVGRFLNGRMLNQLAGSLR
SYIQYAEDIERRAAENRNKLFSKPDEKIEACKKAVRVLDLCIKISTRISAEFTDYFDSEDD
YADYLEKYLKYQDDAIKELSGSSYAALDHFCNKDDLKFDIYVNAGQKPILQRNIVMAK
LFGPDNILSEVMEKVTESAIREYYDYLKKVSGYRVRGKCSTEKEQEDLLKFQRLKNAVE
FRDVTEYAEVINELLGQLISWSYLRERDLLYFQLGFHYMCLKNKSFKPAEYVDIRRNNG
TIIHNAILYQIVSMYINGLDFYSCDKEGKTLKPIETGKGVGSKIGQFIKYSQYLYNDPSYK
LEIYNAGLEVFENIDEHDNITDLRKYVDHFKYYAYGNKMSLLDLYSEFFDRFFTYDMKY
QKNVVNVLENILLRHFVIFYPKFGSGKKDVGIRDCKKERAQIEISEQSLTSEDFMFKLDD
KAGEEAKKFPARDERYLQTIAKLLYYPNEIEDMNRFMKKGETINKKVQFNRKKKITRKQ
KNNSSNEVLSSTMGYLFKNIKL (SEQ ID NO: 38)
Gene ID: E; Gene Type: C2C2; Organism:
8. Listeria seeligeri serovar l/2b str. SLCC3954; Spacer Length-
mode (range): 30; DR1:
GUUUUAGUCCUCUUUCAUAUAGAGGUAGUCUCUUAC (SEQ ID NO: 39); DR2: none;
tracrRNA1:
AUGAAAAGAGGACUAAAACUGAAAGAGGACUAAAACACCAGAUGUGGAUAACUA
UAUUAGUGGCUAUUAAAAAUUCGUCGAUAUUAGAGAGGAAACUUU (SEQ ID NO:
40); tracrRNA2: none; Protein Sequence:
MWISIKTLIHHLGVLFFCDYMYNRREKKUEVKTMRITKVEVDRKKVLISRDKNGGKLV
YENEMQDNTEQIMHHKKSSFYKSVVNKTICRPEQKQMKKLVHGLLQENSQEKIKVSDV
TKLNISNFLNHRFKKSLYYFPENSPDKSEEYRIEINLSQLLEDSLKKQQGTFICWESFSKD
MELYINWAENYISSKTKLIKKSIRNNRIQSTESRSGQLMDRYMKDILNKNKPFDIQSVSE
KYQLEKLIALKATFKEAKICNDKEINYKLKSTLQNHERQIIEELKENSELNQFNIEIRKITL
ETYFPIKKTNRKVGDIRNLEIGEIQKIVNHRLICNKIVQRILQEGKLASYEIESTVNSNSLQK
IKIEEAFALKFINACLFASNNLRNMVYPVCKLVQDILMIGEFKNSFKEIKHKKFMQQQRR
QEITVDDIELASWGLRGAIAPIRNEIIHLKKHSWKKPFNNPTFKVKKSKIINGKT
FLYKETLFKDYFYSELDSVPELIINKMESSKILDYYSSDQLNQVFTIPNFELSLLTSAVPFA
PSFKRVYLKGFDYQNQDEAQPDYNLKLNIYNEKAFNSEAFQAQYSLFKMVYYQVFLPQ
FTTNNDLFKSSVDFILTLNKERKGYAKAFQDIRKMNKDEKPSEYMSYIQSQLMLYQKKQ
EEKEKINHFEKFINQVFIKGFNSFIEKIIRLTYICHPTKNTVPENDNIEIPFHTDMDDSNIAF
WLMCIQLDAKQLSELRNEMIKFSCSLQSTEEISTFTKAREVIGLALLNGEKGCNDWKEL
FDDKEAWKKNMSLYVSEELLQSLPYTQEDGQTPVINRSIDLVKKYGTETILEKLFSSSDD
YKVSAKDIAKLHEYDVTEKIAQQESLHKQWIEKPGLARDSAWTKKYQNVINDISNYQW
AKTKVELTQVRHLHQLTIDLLSRLAGYMSIADRDFQFSSNYILERENSEYRVTSWILLSE
NKNKNKYNDYELYNLKNASIKVSSKNDPQLKVDLKQLRLTLEYLELFDNRLKEKKH
HFNYLNGQLGNSILELFDDARDVLSYDRKLKNAVSKSLKEILSSHGMEVTFKPLYQTNH
HLKIDKLQPKKIHHLGEKSTVSSNQVSNEYCQLVRTLLTMK (SEQ ID NO: 41)
Gene ID: F; Gene Type: C2C2; Organism: 12. Leptotrichia wadei F0279; Spacer
Length-mode (range): 31; DR1:
GUUUUAGUCCCCUUCGUUUUUGGGGUAGUCUAAAUC (SEQ ID NO: 42); DR2: none;
tracrRNA1:
GAUUUAGAGCACCCCAAAAGUAAUGAAAAUUUGCAAUUAAAUAAGGAAUAUUAA
AAAAAUGUGAUUUUAAAAAAAUUGAAGAAAUUAAAUGAAAAAUUGUCCAAGUAA
AAAAA (SEQ ID NO: 43); tiacrRNA2:
AUUUAGAUUACCCCUUUAAUUUAUUUUACCAUAUUUUUCUCAUAAUGCAAACUA
AUAUUCCAAAAUUUUU (SEQ ID NO: 44); Protein Sequence:
MGNLFGHKRWYEVRDKKDFKIKRKVKVKRNYTCNK
INYKKNDNILKEFTRKFHAGNILFKLKGKEGIIRIENNDDFLETEEVVLYIEAYGKSEKLK
ALGITKKKIIDEAIRQGITKDDKKIEIKRQENEEEIEIDIRDEYTNKTLNDCSIILRIIENGDLELE
TKKSIYEIFKNINMSLYKIIEKIIENETEKVFENRYYEEHLREKLLKDDKIDVILTNFMEIRE
KIKSNLEILGFVKFYLNVGGDKKKSKNKKMLVEKILNINVDLTVEDIADFVIKELEFWNf
TmEKVKKVNNEFLEKRRNRTYIKSYVLLDKHEKFKIERENKKDKIVKFFVENIKNNSI
KEKIEKILAEFKIDELIKKLEKELKKGNCDTEIFGIFKKHYKVNFDSKKFSKKSDEEKELY
KIIYRYLKGRIEKILWEQKVRLKKMEKIEIEKILNESILSEKLVLKRVKQYTLEHIMYLGKL
RHNDIDMTTWTDDFSRLHAKEELDLELITFFASTNMELNKIFSRENIHWQQQKDRDS
EKNYVLDKKILNSKIKIIRDLDFIDNKNNITNNFIRKFTKIGTNERNRILHAISKERDLQGT
QDDYNKVINNQNLKISDEEVSKALNLDVVFKDKKNIITKINDIKISEENNNRRKKHKDDKS
VLPEILNLYRNNPKNEPFDTIETEIGVLNALIYVNKELYKKLILEDDLEENRESKNIFLQELK
KTLGNIDEIDENUENYYKNAQISASKGNNKAIKKYQKKVIECYIGYLRKNYEELFDFSDF
KMNIQEIKXQIKDINDNKTYERITVKTSDKTIVINDDFEYIISIFALLNSNAVINW
TSVWLNTSEYQNIIDILDEIMQLNTLRNECITENWNLNLEEFIQKMKEIEKDFDDFKIQTK
KEIFNNYYEDIKNNILTEFKDDINGCDVLEKKLEKIVIFDDETKFEIDKKSNILQDEQRKLS
NINKKDLKICKVDQYIKDKIIQEIKSKILCRIIFNSDFLKKYKKYKKEIKNLIEDMESENENKFQE
IYYPKERKNELYIYKKNLFLNIGNPNFDKIYGLISNDIKMADAKFUIDGKNIRKNKISEI
DAILKNLNDKLNGYSKEYKEKYIKKLKENDDFFAKNIQNKNYKSFEKDYNRVSEYKKIR
DLVEFNYU+KIESYLIDINWKLAIQMARFERDMHYIVNGLRELGIIKLSGYNTGISRAYPK
RNGSIFFYTTTAYYKFFDEESYKKFEKICYGFGIDLSENSEINKPENESnWYISHFYIVRN
PFADYSIAEQIDRVSNLLSYSTRYNNSTYASVFEVFKKDVNLDYDELKKKFKLIGNNDIL
ERLMKPKKVSVLELESYNSDYIKNLHELLTKIENTNDTL (SEQ ID NO: 45)
Gene ID: G; Gene Type: C2C2; Organism: 14. Leptotrichia shahii
DSM 19757 B031;
Spacer Length-mode (range): 30 (30-32); DR1:
GUUUUAGUCCCCUUCGAUAUUGGGGUGGUCUAUAUC (SEQ ID NO: 46); DR2: none;
tracrRNA1:
AWGAUGUGGUAUACUAAAAAUGGAAAAUUGUAUUUUUGAUUAGAAAGAUGUAA
AAUUGAUUUAAUUUAAAAAUAUUUUAUUAGAUUAAAGUAGA (SEQ ID NO: 47);
iracrRNA2: none; Protein Sequence:
MSIYQEFWKYSIKTLRFELIPQGKTLENIKARGLILDDEKRAKDYKKAKQIIDKYIIQF
FIEEILSSVCISEDLLQNYSDVYFKLKKSDDDNLQKDFKSAKDTIICKQISEYIKDSEKFKN
LFNQNLIDAKKGQESDLILWLKQSKDNGIELFKANSDITDIDEALEHKSFKGWTTYFKGF
HENRKNVYSSNDIIIIYRIVDDNLPKPLENKAKYTISLKDKAPEAINYEQIKKDLAEELT
FDIDYKTSEVNQRVFSLDEVFEIANFNNYLNQSGITKFNTIIGGKFVNGENTKRKGINEYI
NLYSQQINDKTLKKYKMSVLFKQILSDTESKSFVIDKLEDDSDVVTTMQSFYEQIAAFKT
VEEKSIKETLSLLFDDLKAQKLDLSKIYFKNDKSLTDLSQQVFDDYSVIGTAVLEYITQQI
APKNLDNPSKKEQELIAKKTEKArCYLSLETIKLALEEFNKKRDIDKQCRFEEILANFAAIP
MIFDEIAQNKDNLAQISIKYQNQGKKDLLQASAEDDVKAIKDLLDQTNNLLHKLIGFH+
QSEDKANILDKDEHFYLVFEECYFELANIVPLYNKIRNYITQKPYSDEKFKLNFENSTLA
NGWDKNKEPDNTAILFIKDDKYYLGVNKKNNKIFDDKAIKENKGEGYKKIVYKLLPG
ANKMLPKVFFSAKSIKFYNPSEDILRIRNHSTHTKNGSPQKGYEKFEFNIEDCRKFIDFYK
QSISKIIPEWKDFGFRFSDTQRYNSIDEFYREVENQGYKLTFENISESYIDSVVNQGKLYL
FQIYNKDFSAYSKGRPNLHTLYWKALFDERNLQDVVYKLNGEAELFYRKQSIPKKITHP
AKEAIANKNKDNPKXESVFEYDUKDKRFTEDKFFFHCPITINFKSSGANKFNDEINLLLK
EKANDVHILSIDRGERHLAYYTLVDGKGNIIKQDTFNIIGRMKTNYHDKLAAIEKDR
DSARKDWKINNIKENfGYLQVVHEIAKLVIEYNAlVVFEDLNFGFKRGRFKVEKQV
YQKLEKMLIEKLNYLVFKDNEFDKTGGVLRAYQLTAPFETFKKMGKQTGIIYYVPAGFT
SKICPVTGFVNQLYPKYESVSKSQEFFSKFDKICYNLDKGYFEFSFDYKNFGDKAAKGK
WTIASFGSRLINFRNSDKNHNWDTREVYPTKELEKLLKDYSIEYGHGECIKAAICGESDK
KFFAKLTSVLNTILQMRNSKTGTELDYLISPVADVNGNFFDSRQAPKNMPQDADANGA
YHIGLKGLMLLGRIKNNQEGKKLNLVIKNEEYFEFVQNRNN (SEQ ID NO: 48)
Gene ID: H; Gene Type: Cpf1; Organism: Francisella ularensis
subsp. novicida
U1I2; Spacer Length-mode (range): 31; DR1:
GUCUAAGAACUUUAAAUAAUUUCUACUGUUGUAGAU (SEQ ID NO: 49); DR2: none;
tracrRNA1:
AUCUACAAAAUUAUAAACUAAAUAAAGAUUCUUAUAAUAACUUUAUAUAUAAUC
GAAAUGUAGAGAAUUUU (SEQ ID NO: 50); tracrRNA2: none; Protein Sequence:
MSIYQEFVNKYSLSKTLRFELIPQGKTLENIKARGLILDDEKRAKDYKXAKQIIDKYHQF
FIEEILSSVCISEDLLQNYSDVYFKLKKSDDDNLQKDFKSAKDTIKKQISEYIKDSEKFKN
LFNQNLIDAKKGQESDLILWLKQSKDNGIELFKANSDITDIDEALEIIKSFKGWTTYFKGF
HENRKNVYSSNDIPTSIRYRIVDDNLPKFLENKAKYESLKDKAPEAINYEQIKKDL
FDIDYKTSEVNQRVFSLDEVFEIANFNNYLNQSGITKFNTNGGKFVNGENTKRKGINEYI
NLYSQQINDKTLKKYKMSVLFKQILSDTESKSFVIDKLEDDSDVVTTMQSFYEQIAAFKT
VEEKSIKETLSLLFDDLKAQKLDLSKIYFKNDKSLTDLSQQVFDDYSVIGTAVLEYITQQI
APKNLDNPSKKEQELIAKKTEKAKYLSLETIKLALEEFNKHRDIDKQCRFEEILANFAAIP
MIFDEIAQNKDNLAQISIKYQNQGKKDLLQASAEDDVKAIKDLLDQTNNLLHKLKIFHIS
QSEDKANLDKDEHFYLVFEECYFELANIVPLYNKIRNYITQKPYSDEKPKLNFENSTLA
NGWDKNKEPDNTAILFIKDDKYYLGVMNKKNNKIFDDKAIKENKGEGYKKIVYKLLPG
ANKMLPKVFFSAKSIKFYNPSEDILRIRNHSTHTKNGSPQKGYKFEFNIEDCRKFIDFYK
QSISKHPEWKDFGFRFSDTQRYNSIDEFYREVENQGYKLTFENISESYIDSVVNQGKLYL
FQIYNKDFSAYSKGRPNLHTLYWKALFDERNLQDVVYKLNGEAELFYRKQSIPKKTHP
AKEAIANKNKDNPKKESVFEYDLIKDKRFTEDKFFFHCPITINFKSSGANKFNDEINLLLK
EKANDVHILSIDRGERHLAYYTLVDGKGNIIKQDTFNIIGNDRMKTNYHDKLAAIEKDR
DSARKDWKKINNIKXMKEGYLSQWHEIAKLVIEYNAIVVFEDLNFGFKRGRFKVEVQV
YQKLEKMLIEKLNYLVFKDNEFDKTGGVLRAYQLTAPFETFKKMGKQTGIIYYVPAGFT
SKICPVTGFVNQLYPKYESVSKSQEFFSKFDKICYNLDKGYFEFSFDYKNFGDKAAKGK
WTIASFGSRLINFRNSDKNHNWDTREVYPTKELEKLLKDYSIEYGHGECIKAAICGESDK
KFFAKLTSVLNTILQMRNSKTGTELDYLISPVADVNGNFFDSRQAPKNMPQDADANGA
YHIGLKGLMLLGRIICNNQEGKKLNLVIKNEEYFEFVQNRNN (SEQ ID NO: 51)

[0991] Genes for Synthesis

[0992] For genes A through H, the Applicants optimize the genes for human expression and append the following DNA sequence to the end of each gene. Note this DNA sequence contains a stop codon (underlined), so no stop codon is added to the codon optimized gene sequence:

(SEQ ID NO: 52)
AAAAGGCCGGCGGCCACGAAAAAGGCCGGCCAGGCAAAAAAGAAAAAGgg
atccTACCCATACGATGTTCCAGATTACGCTTATCCCTACGACGTGCCTG
ATTATGCATACCCATATGATGTCCCCGACTATGCCTAA

[0993] For optimization, avoid the following restriction sites: BamHI, EcoRI HindIII, BsmBI, BsaI, BbsI, AgeI, XhoI, NdeI, NotI, KpnI, BsrGI, SpeI, XbaI, NheI

[0994] These genes are cloned into a simple mammalian expression vector:

>A
MSLNRIYQGRVAAVETGTALAKGNVEWMPAAGGDEVLWQHHELFQAAINY
YLVALLALADKNNPVLGPLISQMDNPQSPYHVWGSFKKQGRQRTGLSQAVAPYITPGN
NAPTLDEVFRSILAGNPTDRATLDAALMQLLKACDGAGAIQQEGRSYWPKFCDPDSTA
NFAGDPAMLRREQHRLLLPQVLHDPAITHDSPALGSFDTYSIATPDTRTPQLTGPKARAR
LEQAITLWRVRLPESAADFDRLASSLKKIPDDDSRLNLQGYVGSSAKGEVQARLFALLL
FRHLERSSFTLGLLRSATPPPKNAETPPPAGVPLPAASAADPVRIARGKRSFVFRAFTSLP
CWHGGDNIHPTWKSFDIAAFKYALTVINQIEEKTKERQKECAELETDFDYMHGRLAKIP
VKYTTGEAEPPPILANDLRIPLLRELLQNIKVDTALTDGEAVSYGLQRRTIRGFRELRTTHW
RGHAPAGTVFSSELKEKLAGELRQFQTDNSTTIGSVQLFNELIQNPKYWPIWQAPDVETA
RQWADAGFADDPLAALVQEAELQEDIDALKAPVKLTPADPEYSRRQYDFNAVSKFGAG
SRSANRHEPGQTERGHNTFTTEIAARNAADGNRWRATHVRIHYSAPRLLRDGLRRPDTD
GNEALEAVPWLQPMMEALAPLPTLPQDLTGMPVFLMPDVTLSGERRILLNLPVTLEPAA
LVEQLGNAGRWQNQFFGSREDPFALRWPADGAVKTAKGKTHIPWHQDRDHFTVLGVD
LGTRDAGALALLNVTAQKPAKPVHRIIGEADGRTWYASLADARMIRLPGEDARLFVRG
KLVQEPYGERGRNASLLEWEDARNIILRLGQNPDELLGADPRRHSYPEINDKLLVALRR
AQARLARLQNRSWRLRDLAESDKALDEIHAERAGEKPSPLPPLARDDAIKSTDEALLSQ
RDIIRRSFVQlANLILPLRGRRWEWRPHVEVPDCHILAQSDPGTDDTKRLVAGQRGISM
RIEQIEELRRRCQSLNRALRHKPGERPVLGRPAKGEEIADPCPALLEKINRLRDQRVDQT
AHAILAAALGVRLRAPSKDRAERRHRDIHGEYERFRAPADFVVIENLSRYLSSQDRARSE
NTRLMQWCHRQIVQKLRQLCETYGIPVLAVPAAYSSRFSSRDGSAGFRAVHLTPDHRH
RMPWSRILARLKAHEEDGKRLEKTVLDEARAVRGLFDRLDRFNAGHVPGKPWRTLLAP
LPGGPVFVPLGDATPiMQADLNAAINIALRGlAAPDRHDIHHRLRAENKiQULSLRLGTQR
EKARWPGGAPAVTLSTPNNGASPEDSDALPERVSNLFVDIAGVANFERVTIEGVSQKFA
TGRGLWASVKQRAWNRVARLNETVTDNNRNEEEDDIPM (SEQ ID NO: 53)
>B
MATRSFILKJEPOTEVKKGLWKTHEVLNHGIAYYMNILKLIRQEAIYEHHEQD
PKNPKKVSKAEIQAELWDFVLKMQKCNSFTHEVDKDVVFNILRELYEELVPSSVEKKGE
ANQLSNKFLYPLVDPNSQSGKGTASSGRKPRWYNLKIAGDPSWEEEKKKWEEDKKKDP
LAKILGKLAEYGLIPLFIPFTDSNEPIVKEIKWMEKSRNQSVRRLDKDMFIQALERFLSWE
SWNLKVKEEYEKVEKEHKTLEERIKEDIQAFKSLEQYEKERQEQLLRDTLNTNEYRLSK
RGLRGWREIIQKWLKMDENEPSEKYLEVFKDYQRICHPREAGDYSVYEFLSKKENHFIW
RNHPEYPYLYATFCEIDKKKKDAKQQATFTLADPINHPLWVRFEERSGSNLNKYRILTE
QLHTEKLKKKLTVQLDRLIYPTESGGWEEKGKVDIVLLPSRQFYNQIFLDIEEKGKHAFT
YKDESIKFPLKGTLGGARVQFDRDHLRRYPHKVESGNVGRIYFNMTVNIEPTESPVSKSL
KIHRDDFPKFVWKPKELTEWIKDSKGKKLKSGIESLEIGLRVMSIDLGQRQAAAIIFEV
VDQKPDIEGKLFFPIKGTELYAVHRASFNIKLPGETLVKSREVLRKAREDNLKLMNQKL
NFLRNVLHFQQFEDITEREKRVTKWISRQENSDVPLVYQDELIQIRELMYKPYKDWVAF
LKQLHKRLEVEIGKEVKHWRKSLSDGRKGLYGISLKNIDEIDRTRKFLLRWSLRPTEPGE
VRRLEPGQRFAIDQLNHLNALKEDRLKKMANTIMMIIMHALGYCYDVRKKKWQAKNPACQI
ILFEDLSNYNPYEERSRFENSKLMKWSRREIPRQVALQGEIYGLQVGEVGAQFSSRFHAK
TGSPGIRCSVVTKEKLQDNRFFKNLQREGRLTLDKIAVLKEGDLYPDKGGEKFISLSKDR
KLVTTHADINAAQNLQKRFWTRTHGFYKVYCKAYQVDGQTVYIPESKDQKQKIIEEFG
EGYFILKDGVYEWGNAGKLKIBCKGSSKQSSSELVDSDILKDSFDLASELKGEKLMLYRD
PSGNVFPSDKWMAAGVFFGKLERILISKLTNQYSISTIEDDSSKQSM (SEQ ID NO: 54)
>C
MAIRSIKLKLKTHTGPEAQNLRKGIWRTHRLLNEGVAYYMKMLLLFRQESTG
ERPKEELQEELICHIREQQQRNQADKNTQALPLDKALEALRQLYELLVPSSVGQSGDAQI
ISRKFLSPLVDPNSEGGKGTSKAGAKPTWQKKKEANDPTWEQDYEKWKKRREEDPTAS
VITTLEEYGIRPIFPLYTNTVTDIAWLPLQSNQFVRTWDRDMLQQAIERLLSWESWNKRV
QEEYAKLKEKMAQLNEQLEGGQEWISLLEQYEENRERELRENMTAANDKYRITKRQM
KGWNELYELWSTFPASASHEQYKEALKRVQQRLRGRFGDAHFFQYLMEEKNRLIWKG
NPQRIHYFVARNELTKRLEEAKQSATMTLPNARKHPLWVRFDARGGNLQDYYLTAEAD
KPRSRRFVTFSQUWPSESGWMEKKDVEVELALSRQFYQQVKLLKNDKGKQKIEFKDK
GSGSTFNGHLGGAKLQLERGDLEKEEKNFEDGEIGSVYLNVVIDFEPLQEVKNGRVQAP
YGQVLQLIRRPNEFPKVTTYKSEQLVEWIKASPQHSAGVESLASGFRVMSIDLGLRAAA
ATSIFSVEESSDKNAADFSYWIEGTPLVAVHQRSYMLRLPGEQVEKQVMEKRDERFQLH
QRVKFQIRVLAQIMRMANKQYGDRWDELDSLKQAVEQKKSPLDQTDRTFWEGIVCDL
TKVLPRNEADWEQAVVQIHRKAEEYVGKAVQAWRKRFAADERKGIAGLSMWNIEELE
GLRKLLISWSRRTRNPQEVNRFERGHTSHQRLLTHIQNVKEDRLKQLSHAIVMTALGYV
YDERKQEWCAEYPACQVILFENLSQYRSNLDRSTKENSTLMKWAHRSIPKYVHMQAEP
YGIQIGDVRAEYSSRFYAKTGTPGIRCKKVRGQDLQGRRFENLQKRLVNEQFLTEEQVK
QLRPGDIVPDDSGELFNFFGNGSGSKEVWLQADWAAHNLQKRFWQRYNELFKVSCR
VIVRDEEEYLVPKTKSVQAKLGKGLFViCKSDTAWKDVYVWDSQAKLKGKTTFTEESES
PEQLEDFQEIIEEAEEAKGTYRTLFRDPSGVFFPESVWYPQKDFWGEVKRKLYGJCLRERF
LTKAR (SEQ ID NO: 55)
>D
MKISKVDHTRMAVAKGNQHRRDEISGILYKDPTKTGSIDQLLGAGGAKKLNCSAKI
LYHVRAGIAEGSNKYKNIVDKVNMLDRVLFTGKSYDRKSIIDIDTVLRNVEKINAFDRI
STEEREQIIDDLLEIQLRKGLRKGKAGLREVLLIGAGVIVRTDKKQEIADFLEILDEDFNK
TNQAKNIKLSIENQGLVVSPVSRGEERIFDVSGAQKGKSSKKAQEKEALSAFLLDYADL
DKNVRFEYLRKIRRLINLYFYVKNDDVMSLTEIPAEVNLEKDFDIWRDHEQRKEENGDF
VGCPDILLADRDVKKSNSKQVKIAERQLRESIREKNIKRYRFSIKTIEKDDGTYFFANKQI
SVFIHRIENAVERILGSINDKKLYRLRLGYLGEKVWKDILNFLSIKYIAVGKAVFNFAM
DDLQEKDRDIEPGKISENAVNGLTSFDYEQIKADEMLQREVAVNVAFAANNLARVTVDI
PQNGEKEDILLWNKSDIKKYKKNSKKGILKSILQFFGGASTWNMKMFEIAYHDQPGDYE
ENYLYDIIQIIYSLRNKSFHFKTYDHGDKNWNRELIGKMIEHDAERVISVEREKFHSNNLP
MFYKDADLKKILDLLYSDYAGRASQVPAFNTVLVRKNFPEFLRKDMGYKVHFNNPEVE
NQWHSAVYYLYKEIYYNLFLRDKEVKNLFYTSLKNIRSEVSDKKQKLASDDFASRCEEI
EDRSLPEICQIIMTEYNAQNFGNRKVKSQRVIEKNKDIFRHYKMLLIKTLAGAFSLYLKQ
ERFAFIGKATPIPYETTDVKNFLPEWKSGMYASFVEEIKNNLDLQEWYIVGRFLNGRML
NQLAGSLRSYIQYAEDIERRAAENRNKLFSKPDEKIEACKKAVRVLDLCIKISTRISAEFT
DYFDSEDDYADYLEKYLKYQDDAIKELSGSSYAALDHFCNKDDLKFDIYVNAGQKPIL
QRNIVMAKLFGPDNILSEVMEKVTESAIREYYDYLKKVSGYRVRGKCSTEKEQEDLLKF
QRLKNAVEFRDVTEYAEVINELLGQLISWSYLRERDLLYFQLGFHYMCLKNKSFKPAEY
VD1RRNNGTIIHNAILYQIVSMYINGLDFYSCDKEGKTLKPIETGKGVGSKIGQFIKYSQY
LYNDPSYKLEIYNAGLEVFENIDEHDNITDLRKYVDHFKYYAYGNKMSLLDLYSEFFDR
FFTYDMKYQKNVVNVLENILLRHFVIFYPKFGSGKKDVGIRDCKKERAQIEISEQSLTSE
DFMFKLDDKAGEEAKKFPARDERYLQTIAKLLYYPNEIEDMNRFMKKGETINKKVQFN
RKKKITRKQKNNSSNEVLSSTMGYLFKNIKL (SEQ ID NO: 56)
>E
MWISIKTLIHHLGVLFFCDYMYNRREKKIIEVKTMRITKVEVDRKKVLISRDK
NGGKLVYENEMQDNTEQIMHHKKSSFYKSVVNKTICRPEQKQMKKLVHGLLQENSQE
KIKVSDVTKLNISNFLNHRFKKSLYYFPENSPDKSEEYRIEINLSQLLEDSLKKQQGTFIC
WESFSKDMELYINWAENYISSKTKLIKKSIRNNRIQSTESRSGQLMDRYMKDILNKNK
DIQSVSEKYQLEKLTSALKATFKEAKKNDKEINYKLKSTLQNHERQIIEELKENSELNQF
NIEIRKHLETYFP1KKTNRKVGDIRNLEIGEIQKIVNHRLKNKIVQRILQEGKLASYEIESW
NSNSLQKIKIEEAFALKFINACLFASNNLRNMVYPVCKKDILMKIEFKNSFKEIKHKKFIR
QWSQFFSQEITVDDIELASWGLRGAIAPIRNEIIHLKKHSWKKFFNNPTFKVKKSKIINGK
TKDVTSEFLYKETLFKDYFYSELDSVPEUINKMESSKILDYYSSDQLNQVFTIPNFELSLL
TSAVPFAPSFKRVYLKGFDYQNQDEAQPDYNLKLNIYNEKAFNSEAFQAQYSLFKMVY
YQVFLPQFTTNNDLFKSSVDFILTLNKERKGYAKAFQDIRKMNKDEKPSEYMSYIQSQL
MLYQKKQEEKEKINHFEKFINQVFIKGFNSFIEKNRLTYICHPTKNTVPENDNIEIPFHTD
MDDSNIAFWLMCKLLDAKQLSELRNEMIKFSCSLQSTEEISTFTKAREV1GLALLNGEKG
CNDWKELFDDKEAWKKTMSLYVSEELLQSLPYTQEDGQTPVINRSIDLVKKYGTETILE
KLFSSSDDYKVSAKDIAKLHEYDVTEKIAWESLHKQWIEKPGLARDSAWTKKYQNVIN
DISNYQWAKTKVELTQVRHLHQLTIDLLSRLAGYMSIADRDFQFSSNYILERENSEYRVT
SWILLSENKNKNKYNDYELYNLKNASIKVSSKhnDPQLKVDLKQLRLTLEYLELFDNTILK
EKRNNISHFNYLNGQLGNSILELFDDARDVLSYDRKLKNAVSKSLKEILSSHGMEVTFKP
LYQTNHHLKIDKLQPKKIHHLGEKSTVSSNQVSNEYCQLVRTLLTMK (SEQ ID NO: 57)
>F
MKVTKVDGISHKKYIEEGKLVKSTSEENRTSERLSELLSIRLDIYIKNPDNASE
EENRIRRENLKKFFSNKVLHLKDSVLYLKNRKEKNAVQDKNYSEEDISEYDLKNKNSFS
VLKKILLNEDVNSEELEIFRKDVEAKLNKINSLKYSFEENKANYQKINENNVEKVGGKS
KRNIIYDYYRESAKRNDYITTQQEAFDKLYKKEDIEICLFFLIENSKKHEKYKIREYYHKII
GRKNDKENFAKIIYEEIQNVNNIKELIEKIPDMSELKKSQVFYKYYLDKEELNDKNIKYA
FCHFVEIEMSQLLKNYVYKRLSNISNDKIKRIFEYQNLKKLIENKLLNKLDTYVRNCGKY
NYYLQVGEIATSDFIARNRQNEAFLRNIIGVSSVAYFSLRNILETENENDITGRMRGKTVK
NNKGEEKYVSGEVDKIYNENKQNEVKENLKMFYSYDRAMDNKNEIEDFFANIDEAISSI
RHGIVHFNLELEGKDIFAFKNIAPSEISKKMFQNEDSSSDKAMAAKDKLSLELEELEEM
VIIKYLKNTKFNFWKNIPFVPSFTKLYNKJEDLRNTLKFFWSVPKDKEEKIDAQIYLLKNI
YYGEFLNKFVKNSKWFKITNEVIKINKQRNQKTGHYKYQKFENIEAQQKQEEWSRRSLK
EMINNQDKEEKNTYIDFIQQIFLKGNIQKYTHLKNKVDGNELENELENELELAASKIS
KYDKJLKNYEKHNRNKEIPHEINEFVREIKLGKILKYTENLNMFYLILKLLNHKELTNLK
GSLEKYQSANKEETFSDELELINLLNLDNNRVTEDFELEANEIGKLFLFENENKIKDRKL
KKFDTNKIWDGENIIKHRAFYNIKKYGMLNLLEKIADKAKYXISLKELKEYSNKKNEIE
KNYTMQQNLHRKYARPKKDEKFNDEDYKEYEKAIGNIQKYTHLKNKVEFNELNLLQG
LLLKILHRLVGYTSIWERDLRFRLKGEFPENHYIEEIFNFDNSKNVKYKSGQIVEKYINFY
KELYKDNVEKRSIYSDKKVKKLKQEKKDLYIRNYIAHFNYIPHAEISLLEVLENLRKLLS
YDRKLKNAIMKSIVDILKEYGFVATFKIGADKKIEIQTLESEKIVHLKNLKKKKLMTDRN
SEELCELVKVMFEYKALE (SEQ ID NO: 58)
>G
MGNLFGHKRWYEVRDKKDFKIKRKVKVKRNYDGNKYILNINENNNKEKID
NNKFIRKYINYKKNDNILKEFTRKFHAGNILFKLKGKEGIRRIENNDDFLETEEVVLYIEA
YGKSEKLKALGITKKKIIDEAIRQGITKDDKKIEIKRQENEEEIEIDIRDEYTNKTLNDCSII
LRIIENDELETKKSIYEIFKTINMSLYKIIEKIIENETEKVFENRYYEEHLREKLLKDDKJDV
ILTNFMEIREKIKSNLEILGFVKFYLNVGGDKKKSKNKKMLVEKILNINVDLTVEDIADF
VIKELEFWMTKRIEKVKKVNNEFLEKRRNRTYIFAAKIKKLLKSAALEREEANNMNNTHAL
FVENIKNNSIKEKIEKILAEFKIDELIKKLEKELKKGNCDTEIFGIFKKHYKVNFDSKKFSK
KSDEEKELYKIIYRYLKGRIEKILVNEQKVRLKKMEKIEIEKILNESIIEKILKRVDFFFG
EHIMYLGKLRHNDIDMTTVNTDDFSRLHAKEELDLELITFFASTNMELNIGFSRENINFFFAA
ENIDFFGGDREKNYVLDKKILNSKIKIIRDLDFIDNICNNITNNFIRKFTKIGTNERNRILHAI
SKERDLQGTQDDYNKVINIIQNLKISDEEVSKALNLDVVFKDKKNIITKINDIKISEENNN
DIKYLPSFSKVLPEILNLYRNNPKNEPFDTIETEKIVLNALIYVNKELYKKLILEDDLEENE
SKMFLQELKKTLGNIDEIDENIIENYYKNAQISASKGHQNNKCAIKKYQKKVIECYIGYLRKN
YEELFDFSDFKMMQEKKQIKDINDNKTYERITVKTSDKTIVINDDFEYIISIFALLNSNAV
INKIRNRFFATSVWLNTSEYQNIIDILDEIMQLNTLRNECITENWNLNLEEFIQICMKEIEKD
FDDFKIQTKKEIFNNYYEDIKNNILTEFKDDINGCDVLEKKLEKIVIFDDETKFEIDKKSNJ
LQDEQRKLSNINKKDLKKKVDQYIKDKDQEIKSKILCRIIFNSDFLKKYKKEIDNLIEDME
SENENKFQEIYYPKERKNELYIYKKNLFLNIGNPNFDKIYGLISNDIKMADAKFLFNIG
NIRKNKISEIDAILKNLNDKLNGYSKEYKEKYIKKLKENDDFFAKNIQNKNYKSFEKDYN
RVSEYKKIRDLVEFNYLNKIESYLIDINWKLAIQMARFERDMHYIVNGLRELGIIKLSGY
NTGISRAYPKRNGSIXJFYTTTAYYKFFDEESYKKFEKICYGFGIDLSENSEINKPENESIR
NYISHFYIVRNPFADYSIAEQIDRVSNLIYSTRYNNSTYASVFEVFKKDWLDYDELKK
KPKLIGNNDILERLMKPKKVSVLELESYNSDYIIGLIIELLTKIENTQDTL (SEQ ID NO:
59)
>H
MSIYQEFVNKYSIKTLRFELIPQGKTLENIKARGLILDDEKRAKDYKKAKQIIKQI
DKYHQFFIEEILSSVCISEDLLQNYSDVYFKLKKSDDDNLQKDFKSAKDTIKKQISEYIKD
SEKFKNLFNQNLIDAKKGQESDLILWLKQSKDNGIELFKANSDITDIDEALEIIKSFKGWT
TYFKGFHENRKNVYSSNDIPTSIIYR1VDDNLPKFLENKAKYESLKDKAPEAINYEQIKKD
LAEELTFDIDYKTSEWQRVFSLDEVFEIANFNNYLNQSG1TKFNTIIGGKPVNGENTKRK
GINEYINLYSQQINDKTLKKYKMSVLFKQILSDTESKSFVIDKLEDDSDVVTTMQSFYEQI
AAFKTVEEKSIKETLSLLFDDLKAQKLDLSKIYFKNDKSLTDLSQQVFDDYSVIGTAVLE
YITQQIAPKNLDNPSKKEQELIAKKTEKAKYLSLETIKLALEEFNKHRDIDKQCRFEEILA
NFAAIPMIFDEIAQNKDNLAQISIKYQNKKDLLQASAEDDVKAIKDLLDQTNNLLHK
LKIFHISQSEDKANILDKDEHFYLVFEECWELANIVPLYNKIRNMQKPYSDEKFKLNFE
NSTLANGWDKNKEPDNTAILFIKDDKYYLGVMLQASAEDDVKAIKDLLDQTKGYEKFEF
KLLPGANKMLPKVFFSAKSIKFYNPSEDILRIRNHSTHTKNGSPQKGYEKFEFNIEDCRKF
IDFYKQSISKHPEWKDFGFRFSDTQRYNSIDEFYREVENQGYKLTFENISESYIDSVVNQG
KLYLFQIYNKDFSAYSKGRPNLVVYKLNGEAELFYRKQSIPKIDEFYREVENQGY
KITHPAKEAIANKNKDNPKKESWEYDLTCHTLYWKALFDERNLQDLTFENIVENQGYKLTF
NLLLKEKANDVHILSIDRGERHlAYYTLVIXKGNKQDTFNIIGNDRMKTNYHDKLAAI
EKDRDSARKDWKKINNIKEMKEGYLSQVVHEIAKLVIEYNAIWFEDLNFGFKRGRFKV
EKQVYQKLEKMLIEKLNYLVFKDNEFDKTGGVLRAYQLTAPFETFKKMGKQTGIIYYV
PAGFTSKJCPVTGFVNQLYPKYESVSKSQEFFSKFDKICYNLDKGYFEFSFDYKNFGDKA
AKGKWTIASFGSRLINFRNSDKNHNWDTREVYPTKELEKLLKDYSIEYGHGECIKAA1C
GESDKKFFAKLTSVLNTII+MRNSKTGTELDYLISPVADVNGNFFDSRQAPKNMPQDAD
ANGAYHIGLKGLMLLGRKNNQEGKKLNLVIKNEEYFEFVQNRNN (SEQ ID NO: 60)

[0995] A-locus through G-Locus are cloned and inserted into a low-copy plasmid. A vector that does not contain Amp resistance is used.

>A-locus
TATCCGGTCGAATCGAGAATGACGACCGCTACGTCTTGGACTACGAAGCC
GTGGCCCTTGCCGATGCTCTCGGTGTGGATQTTGCCGACCTGTTCCGCAAGATCGAT
TGCCCCAAGAACCTGCTGCGCAGGCGGGCAGGGTAGGGGAGCGGTTTCCGGCGGAG
ATTTTCGGAGGCGCCGGTAACGTTATGTCGGGGAATTTGCTATACATCGACGATAAT
TAGTTTTGYTGATTCAGGATCGAAATGCGCTCAAACAAAGAACGTTCCGCGTTTCCC
TCATGCGCTACTACGCCCACACCGCCATCTTTCGGCACGCAAACAAAGCAGATGGGT
TGCCTGTCAATGGGTGATCATTGCCTGAAGTTACCATCCATCAATAATATAAATCAT
CCTTACTCCGAATGTCCCTCAATCGCATCTATCAAGGCCGCGTGGCGGCCGTCGAAA
CAGGAACGGCCTTAGCGAAAGGTAATGTCGAATGGATGCCTGCCGCAGGAGGCGAC
GAAGTTCTCTGGCAGCATTACGAACTTTTCCAAGCTGCCATCAACTACTATCTCGTC
GCCCTGCTCGCACTCGCCGACAAAAACAATCCCGTACTTGGCCCGCTGATCAGCCAG
ATGGATAATCCCCAAAGCCCTTACCATGTCTGGGGAAGTTTCCGCCGCCAAGGACGT
CAGCGCACAGGTCTCAGTCAAGCCGTTGCACCTTATATCACGCCGGGCAATAACGCT
CCCACCCTTGACGAAGTTTTCCGCTCCATTCTTGCGGGCAACCCAACCGACCGCGCA
ACTTTGGACGCTGCACTCATGCAATTGCTCAAGGCTTGTGACGGCGCGGGCGCTATC
CAGCAGGAAGGTCGTTCCTACTGGCCCAAATTCTGCGATCCTGACTCCACTGCCAAC
TTCGCGGGAGATCCGGCCATGCTCCGGCGTGAACAACACCGCCTCCTCCYTCCGCAA
GTTCTCCACGATCCGGCGATTACTCACGACAGTCCTGCCCTTGGCTCGTTCGACACTT
ATTCGATTGCTACCCCCGACACCAGAACTCCTCAACTCACCGGCCCCAAGGCACGCG
CCCGTCTTGAGCAGGCGATCACCCTCTGGCGCGTCCGTCTTCCCGAATCGGCTGCTG
ACTTCGArCGCCTTGCCAGTTCCCTCAAAAAAATTCCGGACGACGATTCTCGCCTTA
ACCTTCAGGGCTACGTCGGCAGCAGTGCGAAAGGCGAAGTrCAGGCCCGTCTTTTCG
CCCTTCTGCTATTCCGTCACCTGGACCGTTCCTCCTTTACGCTTGGCCTTCTCCGTTCC
GCCACCCCGCCGCCCAAGAACGCTGAAACACCTCCTCCCGCCGGCGTTCCTTTACCT
GCGGCGTCCGCAGCCGATCCGGTGCGGATAGCCCGTGGCAAACGCAGTTTTGTTTTT
CGCGCATTCACCAGTCTCCCCTGCTGGCATGGCGGTGATAACATCCATCCCACCTGG
AAGTCATTCGACATCGCAGCGTTCAAATATGCCCTCACGGTCATCAACCAGATCGAG
GAAAAGACGAAAGAACGCCAAAAAGAATGTGCGGAACTTGAAACTGATITCGACTA
CATGCACGGACGGCTCGCCAAGATTCCGGTAAAATACACGACCGGCGAAGCCGAAC
CCTCCCCCCATTCTCGCAAACGATCTCCGCATCTTGGTCACCTGAAACCCTGTCCTC
ATATCAAGGTCGACACCGCACTCACCGATGGCGAAGCCGTCTCCTATGGTCTCCAAC
GCCGCACCATTCGCGGTTTCCGCGAGCTGCGCCGCATCTGGCGCGGCCATGCCCCCG
CTGGCACGGTCTTTTCCAGCGAGTTGAAAGAAAAACTAGCCGGCGAACTCCGCCAG
TTCCAGACCGACAACTCCACCACCATCGGCAGCGTCCAACTCTTCAACGAACTCATC
CAAAACCCGAAATACTGGCCCATCTGGCAGGCTCCTGACGTCGAAACCGCCCGCCA
ATGGGCCGATGCCGGTTTTGCCGACGATCCGCTCGCCGCCCTTGTGCAAGAAGCCGA
ACTCCAGGAAGACATCGACGCCCTCAAGGCTCCAGTCAAACTCACTCCGGCCGATC
CTGAGTATTCAAGAAGGCAATACGATTTCAATGCCGTCAGCAAATTCGGGGCCGGCT
CCCGCTCCGCCAATCGCCACGAACCCGGGCAGACGGAGCGCGGCCACAACACCTTT
ACCACCGAAATCGCCGCCCGTAACGCGGCGGACGGGAACCGCTGGCGGGCAACCCA
CGTCCGCATCCATrACTCCGCTCCCCGCCTTCTTCGTGACGGACTCCGCCGACCTGAC
ACCGACGGCAACGAAGCCCTGGAAGCCGTCCCTTGGCTCCAGCCCATGATGGAAGC
CCTCGCCCCTCTCCCGACGCTTCCGCAAGACCTCACAGGCATGCCGGTCTTCCTCAT
GCCCGACGTCACCCTTTCCGGTGAGCGTCGCATCCTCCTCAATCTTCCTGTCACCCTC
GAACCAGCCGCTCTTGTCGAACAACTGGGCAACGCCGGTCGCTGGCAAAACCAGTT
CTTCGGCTCCCGCGAAGATCCATTCGCTCTCCGATGGCCCGCCGACGGTGCTGTAAA
AACCGCCAAGGGGAAAACCCACATACCTTGGCACCAGGACCGCGATCACTTCACCG
TACTCGGCGTGGATCTCGGCACGCGCGATGCCGGGGCGCTCGCTCTTCTCAACGTCA
CTGCGCAAAAACCGGCCAAGCCGGTCCACCGCATCATTGGTGAGGCCGACGGACGC
ACCTGGTATGCCAGCCTTGCCGACGCTCGCATGATCCGCCTGCCCGGGGAGGATGCC
CGGCTCTTTGTCCGGGGAAAACTCGTTCAGGAACCCTATGGTGAACGCGGGCGAAA
CGCGTCTCTTCTCGAATGGGAAGACGCCCGCAATATCATCCTTCGCCTTGGCCAAAA
TCCCGACGAACTCCTCGGCGCCGATCCCCGGCGCCATTCGTATCCGGAAATAAACGA
TAAACTTCTCGTCGCCCTTCGCCGCGCTCAGGCCCGTCTTGCCCGTCTCCAGAACCG
GAGCTGGCGGTTGCGCGACCTTGCAGAATCGGACAAGGCCCTTGATGAAATCCATG
CCGAGCGTGCCGGGGAGAAGCCTTCTCCGCTTCCGCCCTTGGCTCGCGACGATGCCA
TCAAAAGCACCGACGAAGCCCTCCTTTCCCAGCGTGACATCATCCGGCGATCCTTCG
TTCAGATCGCCAACTTGATCCTTCCCCTTCGCGGACGCCGATGGGAATGGCGGCCCC
ATGTCGAGGTCCCGGATTGCCACATCCTTGCGCAGAGCGATCCCGGTACGGATGAC
ACCAAGCGTCTTGTCGCCGGACAACGCGGCATCTCTCACGAGCGTATCGAGCAAAT
CGAAGAACTCCGTCGTCGCTGCCAATCCCTCAACCGTGCCCTGCGTCACAAACCCGG
AGAGCGTCCCGTGCTCGGACGCCCCGCCAAGGGCGAGGAAATCGCCGATCCCTGTC
CCGCGCTCCTCGAAAAGATCAACCGTCTCCGGGACCAGCGCGTTGACCAAACCGCG
CATGCCATCCTCGCCGCCGCTCTCGGTGTTCGACTCCGCGCCCCCTCAAAAGACCGC
GCCGAACGCCGCCATCGCGACATCCATGGCGAATACGAACGCTTTCGTGCGCCCGCT
GATTTTGTCGTCATCGAAAACCTCTCCCGTTATCTCAGCTCGCAGGATCGTGCTCGTA
GTGAAAACACCCGTCTCATGCAGTGGTGCCATCGCCAGATCGTGCAAAAACTCCGTC
AGCTCTGCGAGACCTACGGCATCCCCGTCCTCGCCGTCCCGGCGGCCTACTCATCGC
GTTTTTCTTCCCGGGACGGCTCGGCCGGATTCCGGGCCGTCCATCTGACACCGGACC
ACCGTCACCGGATGCCATGGAGCCGCATCCTCGCCCGCCTCAAGGCCCACGAGGAA
GACGGAAAAAGACTCGAAAAGACGGTGCTCGACGAGGCTCGCGCCGTCCGGGGACT
CTTTGACCGGCTCGACCGGTTCAACGCCGGGCATGTCCCGGGAAAACCTTGGCGCAC
GCTCCTCGCGCCGCTCCCCGGCGGCCCTGTGTTTGTCCCCCTCGGGGACGCCACACC
CATGCAGGCCGATCTGAACGCCGCCATCAACATCGCCCTCCGGGGCATCGCGGCTCC
CGACCGCCACGACATCCATCACCGGCTCCGTGCCGAAAACAAAAAACGCATCCTGA
GCTTGCGTCTCGGCACTCAGCGCGAGAAAGCCCGCTGGCCTGGAGGAGCTCCGGCG
GTGACACTCTCCACTCCGAACAACGGCGCCTCTCCCGAAGATTCCGATGCGTTGCCC
GAACGGGTATCCAACCTGTTTGTGGACATCGCCGGTGTCGCCAACTTCGAGCGAGTC
ACGATCGAAGGAGTCTCGCAAAAATTCGCCACCGGGCGTGGCCTTTGGGCCTCCGTC
AAGCAACGTGCATGGAACCGCGTTGCCAGACTCAACGAGACAGTAACAGATAACAA
CAGGAACGAAGAGGAGGACGACATTCCGATGTAACCATTGCTTCATTACATCTGAG
TCTCCCCTCAATCCCTCTGCCCCATGCGTGATATAACCTCCACCTCATGTCCCGGATC
GGCGCCGGCAACCTGTAGTTCCCTTCCATCCTCCAACACTCCCGCAGATCGCGATCC
GCTGCCGCCGATGCCGGTGCGCCGCCTTCACAACTATCTCTACTGTCCGCGGCTTTTT
TATCTCCAGTGGGTCGAGAATCTCTTTGAGGAAAATGCCGACACCATTGCCGGCAGC
GCCGTGCATCGTCACGCCGACAAACCTACGCGTTACGATGATGAAAAAGCCGAGGC
ACTTCGCACTGGTCTCCCTGAAGGCGCGCACATACGCAGCCTTCGCCTGGAAAACGC
CCAACTCGGTCTCGTTGGCGTGGTGGATATCGTGGAGGGAGGCCCCGACGGACTCG
AACTCGTCGACTACAAAAAAGGTTCCGCCTTCCGCCTCGACGACGGCACGCTCGCTC
CCAAGGAAAACGACACCGTGCAACTTGCCGCCTACGCTCTTCTCCTGGCTGCCGATG
GTGCGCGCGTTGCGCCCATGGCGACGGTCTATTACGCTGCCGATCGCCGGCGTGTCA
CCTTCCCGCTCGATGACGCCCTCTACGCCCGCACCCGTTCCGCCCTCGAAGAGGCCC
GCGCCGTTGCAACCTCGGGGCGCATACCTCCGCCGCTCGTCTCTGACGTCCGCTGCC
TCCATTGTTCCTCCTATGCGCTTTGCCTTCCCCGCGAGTCCGCCTGGTGGTGCCGCCA
TCGCAGCACGCCGCGGGGAGCCGGCCACACCCCCATGTTGCCGGGCTTTGAGGATG
ACGCCGCCGCCATTCACCAAATCTCCGAACCTGACACCGAGCCACCACCCGATCTTG
CCAGCCAGCCTCCCCGTCCCCCGCGGCTCGATGGAGAATTGTTGGTTGTCCAGACTC
CGGGAGCGATGATCGGACAAAGCGGCGGTGAGTTTACCGTGTCCGTCAAGGGTGAG
GTTTTGCGCAAGCTTCCGGTTCATCAACTCCGGGCCATTTACGTTTACGGAGCCGTG
CAACTCACGGCGCATGCTGTGCAGACCGCCCTTGAGGAGGATATCGACGTCTCCTAT
TTTGCGCCCAGCGGCCGCTTTCTTGGCCTCCTCCGCGGCCTGCCCGCATCCGGCGTG
GATGCGCGTCTCGGGCAATACACCCTGTTTCGCGAACCCTTTGGCCGTCTCCGTCTC
GCCTGCGAGGCGATTCGGGCCAAGATCCATAACCAGCGCGTCCTCCTCATGCGTAAC
GGCGAGCCCGGGGAGGGCGTCTTGCGCGAACTCGCCCGTCTGCGCGACGCCACCAG
TGAGGCGACTTCGCTCGACGAACTCCTCGGCATCGAGGGCATCGCCGCGCATTTCTA
TTTCCAGTATTTTCCCACCATGCTGAAAGAACGGGCGGCCTGGGCCTTTGATTTTT
GGACGCAATCGCCGCCCGCCGCGCGACCCGGTCAACGCCCTGCTTTCGTTCGGTTAC
AGCGTGTTGTCCAAGGAACTTGCCGGCGTCTGCCACGCTGTTGGCCTAGACCCGTTT
TTCGGCTTCATGCACCAGCCGCGTTACGGGCGCCCCGCACTCGCTCTCGATCTGATG
GAGGAGTTTCGCCCTCTCATCGCCGACAGTGTTGCCCTGAATCTCATCAACCGTGGC
GAACTCGACGAAGGGGACTTTATCCGGTCGGCCAATGGCACCGCGCTCAATGATCG
GGGCCGCCGGCGTTTTTGGGAGGCATGGTTCCGGCGTCTCGACAGCGAAGTCAGCC
ATCCTGAATTTGGTTACAAGATGAGCTATCGACGGATGCTTGAAGTGCAGGCGCGCC
AGCTATGGCGCTATGTGCGCGGTGACGCCTTCCGCTACCACGGATTCACCACCCGTT
GATTCCGATGTCAGATCCCCGCCGCCGTTATCTTGTGTGTTACGACATCGCCAATCC
GAAGCGATTGCGCCAAGTGGCCAAGCTCCTGGAGAGCTATGGCACGCGTCTGCAAT
ACTCGGTTTTCGAATGTCCTTTGGACGATCTTCGTCTTGAACAGGCGAAGGCTGATTT
GCGCGACACGATTAATGCCGACCAAGACCAGGTGTTATTTGTTTCGCTTGGCCCCGA
AGCCAACGATGCCACGTTGATCATCGCCACGCTTGGGCTCCCTTATACCGTGCGCTC
GCGAGTGACGATTATCTGACCCATAACCCACGTGTTGAAGAGGCTGAAAACAGACG
GACCTCTATGAAGAACAATTGACGTTTTGGCCGAACTCAGCAGACCTTTATGCGGCT
AAGGCCAATGATCATCCATCCTACCGCCATTGGGCTGGAGACGTTTTTTGAAACGGC
GAGTGCTGCGGATAGCGAGTTTCTCTTGGGGAGGCGCTCGCGGCCACTTTTACAGAG
GAGATGTTCGGGCGAACTGGCCGACCTAACAAGGCGTACCCGGCTCAAAATCGAGG
CACGCTCGCACGGGATGATGTAATTCGTTGTTTTTCAGCATACCGTGCGAGCACGGG
CCGCAGCGAATGCCGTTTCACGAATCGTCAGGCGGCGGGGAGAAGTCATTTAATAA
GGCCACTGTTAAAAGCCGCAGCGAATGCCGTTTCACGAATCGTCAGGCGGGCAGTG
GATGTTTTTCCATGAGGCGAAGAATTTCATCGCCGCAGTGAATGCCGTTTCACCATT
GATGAAGAATGCGAGGTGAAAACAGAGAAATTGGGTCAACTCTATCACTCTTATTC
AGCCATCGTTTCAAGAAAGGATACCTCGTATTGGATACAACACAGCTCGTTCGTTCT
CTCTACCTCCCTCGACAATCTCAAGGA (SEQ ID NO: 61)
>B-Locus
TAATAAAATTGAAATATCACTATGGATTATTGTAATATTACCATAAAGAT
AGGTGACGTTTTTTTGAAAATTGTAAACCTAATTTGAAGAAAACCAATTAAAAATCG
CTTCGGCTTTTTTTTAAGTGCCAGGTAGCATTGATGCTAACCCATGTGTAATAAAGGT
TTGTTTTCCTTCGGGGCACGAACACATTATAAGGGAAACCTAAAGATTCCCTTTCTT
GTTTAATATTATAACCAGTGAAAATAAGAATAATGCACCTAAAACTAATATACAGA
AAATAAGAATTAAAAGTACTAATATATACATCATATGTTATCCTCCAATGCTTTATTT
TTTAATAATTGATGTTAGTATTAGTTTTATTTTAATTTCTAAACATAAGAATTTG
AGGATGTGTTTATTATGGCGACACGCAGTTTTATTTTAAAAATTGAACCAAATGAAG
AAGTTAAAAAGGGATTATGGAAGACGCATGAGGTATTGAATCATGGAATTGCCTAC
TACATGAATATTCTGAAACTAATTAGACAGGAAGCTATTTATGAACATCATGAACAA
GATCCTAAAAATCCGAAAAAAGTTTCAAAAGCAGAAATACAAGCCGAGTTATGGGA
TTTTGTTTTAAAAATGCAAAAATGTAATAGTTTTACACATGAAGTTGACAAAGATGT
TGTTTTTAACATCCTGCGTGAACTATATGAAGAGTTGGTCCCTAGTTCAGTCGAGAA
AAAGGGTGAAGCCAATCAATTATCGAATAAGTTTCTGTACCCGCTAGTTGATCCGAA
CAGTCAAAGTGGGAAAGGGACGGCATCATCCGGACGTAAACCTCGGTGGTATAATT
TAAAAATAGCAGGCGACCCATCGTGGGAGGAAGAAAAGAAAAAATGGGAAGAGGA
TAAAAAGAAAGATCCCCTTGCTAAAATCTTAGGTAAGTTAGCAGAATATGGGCTTAT
TCCGCTATTTATTCCATTTACTGACAGCAACGAACCAATTGTAAAAGAAATTAAATG
GATGGAAAAAAGTCGTAATCAAAGTGTCCGGCGACTTGATAAGGATATGTTTATCC
AAGCATTAGAGCGTTTTCTTTCATGGGAAAGCTGGAACCTTAAAGTAAAGGAAGAG
TATGAAAAAGTTGAAAAGGAACACAAAACACTAGAGGAAAGGATAAAAGAGGACA
TTCAAGCATTTAAATCCCTTGAACAATATGAAAAAGAACGGCAGGAGCAACTTCTTA
GAGATACATTGAATACAAATGAATACCGATTAAGCAAAAGAGGATTACGTGGTTGG
CGTGAAATTATCCAAAAATGGCTAAAGATGGATGAAAATGAACCATCAGAAAAATA
TTTAGAAGTATTTAAAGATTATCAACGGAAACATCCACGAGAAGCCGGGGACTATT
CTGTCTATGAATTTTTAAGCAAGAAAGAAAATCATTTTATTTGGCGAAATCATCCTG
AATATCCTTATTTGTATGCTACATTTTGTGAAATTGACAAAAAAAAGAAAGACGCTA
AGCAACAGGCAACTTTTACTTTGGCTGACCCGATTAACCATCCGTTATGGGTACGAT
TTGAAGAAAGAAGCGGTTCGAACTTAAACAAATATCGAATTTTAACAGAGCAATTA
CACACTGAAAAGTTAAAAAAGAAATTAACAGTTCAACTTGATCGTTTAATTTATCCA
ACTGAATCCGGCGGTTGGGAGGAAAAAGGTAAAGTAGATATCGTTTTGTTGCCGTC
AAGACAATTTTATAATCAAATCTTCCTTGATATAGAAGAAAAGGGGAAACATGCTTT
TACTTATAAGGATGAAAGTATTAAATTCCCCCTTAAAGGTACACTTGGTGGTGCAAG
AGTGCAGTTTGACCGTGACCATTTGCGGAGATATCCGCATAAAGTAGAATCAGGAA
ATGTTGGACGGATTTATTTTAACATGACAGTAAATATTGAACCAACTGAGAGCCCTG
TTAGTAAGTCTTTGAAAATACATAGGGACGATTTCCCCAAGTTCGTTAATTTTAAAC
CGAAAGAGCTCACCGAATGGATAAAAGATAGTAAAGGGAAAAAATTAAAAAGTGG
TATAGAATCCCTTGAAATTGGTCTACGGGTGATGAGTATCGACTTAGGTCAACGTCA
AGCGGCTGCTGCATCGATTTTTGAAGTAGTTGATCAGAAACCGGATATTGAAGGGA
AGTTATTTTTTCCAATCAAAGGAACTGAGCTTTATGCTGTTCACCGGGCAAGTTTTAA
CATTAAATTACCGGGTGAAACATTAGTAAAATCACGGGAAGTATTGCGGAAAGCTC
GGGAGGACAACTTAAAATTAATGAATCAAAAGTTAAACTTTCTAAGAAATGTTCTAC
ATTTCCAACAGTTTGAAGATATCACAGAAAGAGAGAAGCGTGTAACTAAATGGATT
TCTAGACAAGAAAATAGTGATGTTCCTCTTGTATATCAAGATGAGCTAATTCAAATT
CGTGAATTAATGTATAAACCCTATAAAGATTGGGTTGCCTTTTTAAAACAACTCCAT
AAACGGCTAGAAGTCGAGATTGGCAAAGAGGTTAAGCATTGGCGAAAATCATTAAG
TGACGGGAGAAAAGGTCTTTACGGAATCTCCCTAAAAAATATTGATGAAATTGATC
GAACAAGGAAATTCCTTTTAAGATGGAGCTTACGTCCAACAGAACCTGGGGAAGTA
AGACGCTTGGAACCAGGACAGCGTTTTGCGATTGATCAATTAAACCACCTAAATGCA
TTAAAAGAAGATCGATTAAAAAAGATGGCAAATACGATTATCATGCATGCCTTAGG
TTACTGTTATGATGTAAGAAAGAAAAAGTGGCAGGCAAAAAATCCAGCATGTCAAA
TTATTTTATTTGAAGATTTATCTAACTACAATCCTTACGAGGAAAGGTCCCGTTTTGA
AAACTCAAAACTGATGAAGTGGTCACGGAGAGAAATTCCACGACAAGTCGCCTTAC
AAGGTGAAATTTACGGATTACAAGTTGGGGAAGTAGGTGCCCAATTCAGTTCAAGA
TTCCATGCGAAAACCGGGTCGCCGGGAATTCGTTGCAGTGTTGTAACGAAAGAAAA
ATTGCAGGATAATCGCTTTTTTAAAAATTTACAAAGAGAAGGACGACTTACTCTTGA
TAAAATCGCAGTTTTAAAAGAAGGAGACTTATATCCAGATAAAGGTGGAGAAAAGT
TTATTTCTTTATCAAAGGATCGAAAGTTGGTAACTACGCATGCTGATATTAACGCGG
CCCAAAATTTACAGAAGCGTTTTTGGACAAGAACACATGGATTTTATAAAGTTTACT
GCAAAGCCTATCAGGTTGATGGACAAACTGTTTATATTCCGGAGAGCAAGGACCAA
AAACAAAAAATAATTGAAGAATTTGGGGAAGGCTATTTTATTTTAAAAGATGGTGT
ATATGAATGGGGTAATGCGGGGAAACTAAAAATTAAAAAAGGTTCCTCTAAACAAT
CATCGAGTGAATTAGTAGATTCGGACATACTGAAAGATTCATTTGATTTAGCAAGTG
AACTTAAGGGAGAGAAACTCATGTTATATCGAGATCCGAGTGGAAACGTATTTCCTT
CCGACAAGTGGATGGCAGCAGGAGTATTTTTTGGCAAATTAGAAAGAATATTGATTT
CTAAGTTAACAAATCAATACTCAATATCAACAATAGAAGATGATTCTTCAAAACAAT
CAATGTAAAAGTTTGCCCGTATAAGAACTTAATTAATTAGGATGGTAGGATGTTACT
AAATATGTCTGTAGGCATCATTCCTACTATCCGTTTTGTCCGAATATCAGAGCATTAG
GTGAGGAATGGTAAGAAAGGAAAATTTATATGAACCAACCGATTCCTATTCGAATG
TTAAATGAAATACAATATTGTGAGCGACTTTTTTACTTTATGCATGTCCAAAAGCTAT
TTGATGAGAATGCAGATACAGTTGAAGGAAGTGCACAGCATGAGCGGGCAGAAAG
AAGCAAAAGACCAAGTAAAATGGGACCAAAGGAATTATGGGGTGAGGCGCCAAGA
AGTCTTAAGCTTGGTGATGAGCTGTTAAATATTACCGGTGTTCTTGATGCCATAAGT
CATGAAGAGAACAGTTGGATCCCGGTTGAATCAAAACACAGTTCCGCACCGGATGG
ATTGAACCCTTTTAAAGTAGATGGCTTTCTACTTGACGGGTCTGCATGGCCAAACGA
TCAAATTCAACTTTGTGCACAAGGCTTGCTCTTGAATGCCAATGGATACCCGTGTGA
TTATGGGTATTTATTTTATCGTGGTAATAAGAAAAAGGTGAAAATTTATTTTACTGA
AGATTTAATCGCTGCCACAAAGTACTATATTAAAAAAGCACACGAGATACTAGTATT
ATCTGGTGATGAATCAGCTATTCCTAAGCCTTTAATTGATTCTAATAAGTGTTTTCGC
TGTTCTTTAAACTATATCTGTCTTCCGGATGAAACGAACTATCTATTAGGGGCAAGTT
CAACAATTCGTAAAATTGTGCCTTCAAGGACAGATGGTGGCGTTTTATATGTATCAG
AGTCTGGTACAAAATTAGGAAAATCGGGTGAGGAGTTAATCATTCAGTATAAAGAT
GGCCAAAAGCAGGGTGTTCCTATAAAAGATATTATTCAAGTTTCGTTAATTGGAAAT
GTTCAATGCTCAACGCAATTACTTCATTTTTTAATGCAATCAAATATTCCTGTAAGTT
ATTTATCATCCCACGGTCGTTTGATTGGTGTCAGTTCATCTTTAGTTACAAAAAATGT
TTTAACAAGGCAGCAACAGTTCATTAAATTTACAAATCCTGAGTTTGGACTAAATCT
AGCAAAACAAATTGTTTATGCCAAGATTCGAAATCAACGAACTTTACTTAGAAGAA
ATGGGGGGAGTGAGGTAAAGGAGATTTTAACAGATTTAAAATCTTTAAGTGACAGT
GCACTGAACGCAATATCAATAGAACAATTACGGGGTATTGAAGGGATTTCTGCAAA
ACATTATTTCGCAGGATTTCCGTTTATGTTGAAAAATGAATTACGTGAATTGAATTTA
ATGAAAGGGCGTAATAGGAGACCGCCAAAAGATCCTGTAAATGTACTTCTTTCTCTT
GGTTATACTTTATTGACACGTGATATTCATGCTGCGTGTGGTTCAGTCGGATTGGATC
CGATGTTTGGTTGTTACCATCGTCCAGAAGCAGGTCGACCGGCTCTAGTATTAGATG
TTATGGAAACATTTCGACCACTTATTGTAGACAGTATTGTCATCCGAGCTTTGAATA
CGGGTGAAATCTCATTAAAAGATTTTTATATAGGAAAAGATAGTTGTCAATTATTAA
AACATGGCCGCGATTCCTTTTTTGCCATTTATGAAAGAAGAATGCATGAAACTATTA
CCGATCCAATTTTCGGCTATAAGATTAGCTATCGCCGTATGCTCGATTTGCACATTCG
AATGCTTGCAAGGTTTATTGAAGGGGAACTGCCGGAATATAAACCATTAATGACCC
GGTGAGTTTGTTTATTAGGTTAAAAGAAGGTGAAGACATGCAGCAATACGTCCTTGT
TTCTTATGATATTrCGGACCAAAAAAGATGGAGAAAAGTATTTAAACTGATGAAAG
GATACGGAGAACATGTTCAATATTCCGTATTCATATGCCAGTTAACTGAATTACAGA
AGGCAAAATTACAAGCCTCTTTAGAAGACATTATCCATCATAAGAATGACCAAGTA
ATGTTTGTTCACATCGGGCCAGTGAAAGATGGTCAACTATCTAAAAAAATCTCAACA
ATTGGGAAAGAATTTGTTCCATTGGATTTAAAGCGGCTTATATTTTGAAAAGATATA
GCAAAGAAATCTTATGAAAAAAATACAAAAATATATTGTTAAAAAATAGGGAATAT
TATATAATGGACTTACGAGGTTCTGTCTTTTGGTCAGGACAACCGTCTAGCTATAAG
TGCTGCAGGGGTGTGAGAAACTCCTATTGCTGGACGATGTCTCTTTTATTTCTTTTTT
CTTGGATCTGAGTACGAGCACCCACATTGGACATTTCGCATGGTGGGTGCTCGTACT
ATAGGTAAAACAAACCTTTTTAAGAAGAATACAAAAATAACCACTAACCTTGGGTGGT
AGGAATTTTGATGGATTTACATAACCTCTCGCAACATGCTTCTAAAACCCAAGCCCA
CCATAGCCCAAAACCCCCTGCGGTCCAAGAAAAAAGAAATGATACGAGGCATTAGC
ACCGGGGAGAAGTCATTTAATAAGGCCACTGTTAAAAGTCCAAGAAAAAAGAAATG
ATACGAGGCATTAGCACAACAATATAAACGACTACTTTACCGTGTTCAAGAAAAAA
GAAATGATATGAGGCATTAGCACGATGGGATGGGAGAGAGAGGACAGTTCTACTCT
TGCTGTATCCAGCTTCTTTTACTTTATCCGGTATCATTTCTTCACTTCTTTCTGCACAT
AAAAAAGCACCTAACTATTTGGATAAGTTAAGTGCTTTTATTTCCGTTTGAAGTTGTC
TATTGCTTTTTTCTTCATATCTTCAAATTTTTTCTGTTTCCTTGTTAAATAGTCAAC
CTGTAATCCCTTTTCTTTTTGGCATTGGGGTATCTTTCCACCTTAGTGTGTTCATAAG
GCTTATATTTATCACTCATTGTATTCCTCCAACACAATTATAATTrTTCCGTCATCCTC
AATCCAACCGTCAACTGTGACAAAAGACGAATCTCTCTTAT (SEQ ID NO: 62)
>C-Locus
GTTTCATTTGGAAAGGGAGAGCATTGGCTTTTCTCTTTGTAAATAAAGTGCCCGT
AAGCTTTGTAATAAGCTTCTAGTGGAGAAGTGATTGTTTGAATCACCCAATGCACAC
GCACTAAAGTTAGACGAACCTATAATTCGTATTAGTAAGTATAGTACATGAAGAAA
AATGCAACAAGCATTTACTCTCTTTTAAATAAAGAATTGATAGCTGTTAATATTGAT
AGTATATTATACCTTATAGATGTTCGATTTTTTTTCAAAFFTCCGTTATTGACGGAAC
AAAGAAAGGAAATAACGTCATGGACAAGCGAAAGCGTAGAAGTTACGAGTTTAGGT
GGGAAGCGGGAGGCACCAGTCATGGCAATCCGTAGCATAAAACTAAAACTAAAAAC
CCACACAGGCCCGGAAGCGCAAAACCTCCGAAAAGGAATATGGCGGACGCATCGGT
TGTTAAATGAAGGCGTCGCCTATTACATGAAAATGCTCCTGCTCTTTCGTCAGGAAA
GCACTGGTGAACGGCCAAAAGAAGAACTACAGGAAGAACTGATTTGTCACATACGC
GAACAGCAACAACGAAATCAGGCAGATAAAAATACGCAAGCGCTTCCGCTAGATAA
GGCACTGGAAGCTTTGCGCCAACTATATGAACTGCTTGTCCCCTCCTCGGTCGGACA
AAGTGGCGACGCCCAGATCATCAGCCGAAAGTTTCTCAGCCCGCTCGTCGATCCGA
ACAGCGAAGGCGGCAAAGGTACTTCGAAGGCAGGGGCAAAACCCACTTGGCAGAA
GAAAAAAGAAGCGAACGACCCAACCTGGGAACAGGATTACGAAAAATGGAAAAAA
AGACGCGAGGAAGACCCAACCGCTTCTGTGATTACTACTTTGGAGGAATACGGCATT
AGACCGATCTTTCCCCTGTACACGAACACCGTAACAGATATCGCGTGGTTGCCACTT
CAATCCAATCAGTTTGTGCGAACCTGGGACAGAGACATGCTTCAACAAGCGATTGA
AAGACTGCTCAGTTGGGAGAGCTGGAACAAACGTGTCCAGGAAGAGTATGCCAAGC
TGAAAGAAAAAATGGCTCAACTGAACGAGCAACTCGAAGGCGGTCAGGAATGGATC
AGCTTGCTAGAGCAGTACGAAGAAAACCGAGAGCGAGAGCTTAGGGAAAACATGA
CCGCTGCCAATGACAAGTATCGGATTACCAAGCGGCAAATGAAAGGCTGGAACGAG
CTGTACGAGCTATGGTCAACCTTTCCCGCCAGTGCCAGTCACGAGCAATACAAAGA
GGCGCTCAAGCGTGTGCAGCAGCGACTGAGAGGGCGGTTTGGGGATGCTCATTTCTT
CCAGTATCTGATGGAAGAGAAGAACCGCCTGATCTGGAAGGGGAATCCGCAGCGTA
TCCATTATTTTGTCGCGCGCAACGAACTGACGAAACGGCTGGAGGAAGCCAAGCAA
AGCGCCACGATGACGTTGCCCAATGCCAGGAAGCATCCATTGTGGGTGCGCTTCGAT
GCACGGGGAGGAAATTTGCAAGACTACTACTTGACGGCTGAAGCGGACAAACCGAG
AAGCAGACGTTTTGTAACGTTTAGTCAGTTGATATGGCCAAGCGAATCGGGATGGAT
GGAAAAGAAAGACGTCGAGGTCGAGCTAGCTTTGTCCAGGCAGTTTTACCAGCAGG
TGAAGTTGCTGAAAAATGACAAAGGCAAGCAGAAAATCGAGTTCAAGGATAAAGGT
TCGGGCTCGACGTTTAACGGACACTTGGGGGGAGCAAAGCTACAACTGGAGCGGGG
CGATTTGGAGAAGGAAGAAAAAAACTTCGAGGACGGGGAAATCGGCAGCGTTTACC
TTAACGTTGTCATTGATTTCGAACCTTTGCAAGAAGTGAAAAATGGCCGCGTGCAGG
CGCCGTATGGACAAGTACTGCAACTCATTCGTCGCCCCAACGAGTTTCCCAAGGTCA
CTACCTATAAGTCGGAGCAACTTGTTGAATGGATAAAAGCTTCGCCACAACACTCGG
CTGGGGTGGAGTCGCTGGCATCCGGTTTTCGTGTAATGAGCATAGACCTTGGGCTGC
GCGCGGCTGCAGCGACTTCTATTTTTTCTGTAGAAGAGAGTAGCGATAAAAATGCGG
CTGATTTTTCCTACTGGATTGAAGGAACGCCGCTGGTCGCTGTCCATCAGCGGAGCT
ATATGCTCAGGTTGCCTGGTGAACAGGTAGAAAAACAGGTGATGGAAAAACGGGAC
GAGCGGTTCCAGCTACACCAACGTGTGAAGTTTCAAATCAGAGTGCTCGCCCAAATC
ATGCGTATGGCAAATAAGCAGTATGGAGATCGCTGGGATGAACTCGACAGCCTGAA
ACAAGCGGTTGAGCAGAAAAAGTCGCCGCTCGATCAAACAGACCGGACATTTTGGG
AGGGGATTGTCTGCGACTTAACAAAGGTTTTGCCTCGAAACGAAGCGGACTGGGAA
CAAGCGGTAGTGCAAATACACCGAAAAGCAGAGGAATACGTCGGAAAAGCCGTTCA
GGCATGGCGCAAGCGCTTTGCTGCTGACGAGCGAAAAGGCATCGCAGGTCTGAGCA
TGTGGAACATAGAAGAATTGGAGGGCTTGCGCAAGCTGTTGATTTCCTGGAGCCGC
AGGACGAGGAATCCGCAGGAGGTTAATCGCTTTGAGCGAGGCCATACCAGCCACCA
GCGTCTCTTOACCCATATCCAAAACGTCAAAGAGGATCGCCTGAAGCAGITAAGTC
ACGCCATTGTCATGACTGCCTTGGGGTATGTTTACGACGAGCGGAAACAAGAGTGGT
GCGCCGAATACCCGGCTTGCCAGGTCATTCTGTTTGAAAATCTGAGCCAGTACCGTT
CTAACCTGGATCGCTCGACCAAAGAAAACTCCACCTTGATGAAGTGGGCGCATCGC
AGCATTCCGAAATACGTCCACATGCAGGCGGAGCCATACGGGATTCAGATTGGCGA
TGTCCGGGCGGAATATTCCTCTCGTTTTTACGCCAAGACAGGAACGCCAGGCATTCG
TTGTAAAAAGGTGAGAGGCCAAGACCTGCAGGGCAGACGGTTTGAGAACTTGCAGA
AGAGGTTAGTCAACGAGCAATTTTTGACGGAAGAACAAGTGAAACAGCTAAGGCCC
GGCGACATTGTCCCGGATGATAGCGGAGAACTGTTCATGACCTTGACAGACGGAAG
CGGAAGCAAGGAGGTCGTGTTTCTCCAGGCCGATATTAACGCGGCGCACAATCTGC
AAAAACGTTTTTGGCAGCGATACAATGAACTGTTCAAGGTTAGCTGCCGCGTCATCG
TCCGAGACGAGGAAGAGTATCTCGTTCCCAAGACAAAATCGGTGCAGGCAAAGCTG
GGCAAAGGGCTTTTTGTGAAAAAATCGGATACAGCCTGGAAAGATGTATATGTGTG
GGACAGCCAGGCAAAGCTTAAAGGTAAAACAACCTTTACAGAAGAGTCTGAGTCGC
CCGAACAACTGGAAGACTTTCAGGAGATCATCGAGGAAGCAGAAGAGGCGAAAGG
AACATACCGTACACTGTTCCGCGATCCTAGCGGAGTCTTTTTTCCCGAATCCGTATG
GTATCCCCAAAAAGATTTTTGGGGCGAGGTGAAAAGGAAGCTGTACGGAAAATTGC
GGGAACGGTTTTTGACAAAGGCTCGGTAAGGGTGTGCAAGGAGAGTGAATGGCTTG
TCCTGGATACCTGTCCGCATGCTAAATGAAATTCAGTATTGTGAGCGACTGTACCAT
ATTATGCATGTGCAGGGGCTGTTTGAGGAAAGCGCAGACACGGTCGAAGGAGCAGC
ACAACACAAGCGTGCAGAGACACATCTGCGCAAAAGCAAGGCAGCGCCGGAAGAG
ATGTGGGGGGACGCTCCGTTTAGCTTGCAGCTCGGCGACCCTGTGCTrGGCATTACG
GGAAAGCTGGATGCCGTCTGTCTGGAAGAAGGTAAGCAGTGGATTCCGGTAGAAGG
AAAGCATTCGGCGTCGCCAGAAGGCGGGCAGATGTTCACTGTAGGCGTGTATTCGCT
GGACGGTTCTGCCTGGCCCAACGACCAAATCCAATTGTGTGCGCAAGGCTTGCTGCT
TCGCGCGAATGGATATGAATCCGATTATGGCTACTTATACTACCGTGGCAATAAAAA
GAAGGTTCGCATTCCTTTTTCGCAGGAACTCATAGCGGCTACTCACGCCTGCATTCA
AAAAGCTCATCAGCTTCGGGAAGCCGAAATTCCCCCTCCGTTGCAGGAGTCGAAAA
AGTGCTTTCGATGCTCGTTAAATTACGTATGCATGCCTGACGAGACGAATTACATGT
TGGGGTTGAGCGCAAACATCAGAAAGATTGTGCCCAGTCGTCCAGATGGCGGGGTA
CTGTATGTTACAGAGCAGGGGGCAAAACTGGGCAGAAGCGGAGAAAGCTTGACCAT
CACCTGCCGGGGCGAAAAGATAGACGAAATCCCGATCAAAGACTTGATTCACGTGA
GCTTGATGGGGCATGTGCAATGCTCTACGCAGCTTCTGCACACCTTGATGAACTGTG
GCGTCCACGTCAGCTACTTGACTACGCATGGCACATTGACAGGAATAATGACTCCCC
CTTTATCGAAAAACATTCGAACAAGAGCCAAGCAGTTTATCAAATTTCAGCACGCGG
AGATCGCCCTTGGAATCGCGAGAAGGGTCGTGTATGCGAAAATTTCCAATCAGCGC
ACGATGCTGCGCCGCAATGGCTCACCAGATAAAGCAGTTTTAAAAGAGTTAAAAGA
GCTTAGAGATCGCGCGTGGGAGGCGCCATCACTGGAAATAGTGAGAGGTATCGAGG
GACGTGCAGCACAGTTGTACATGCAGTTTTTCCCTACCATGTTAAAGCACCCAGTAG
TAGACGGTATGGCGATCATGAACGGTCGCAACCGTCGCCCGCCCAAAGATCCGGTC
AATGCGCTGCTCTCCCTCGGCTATACGCTTCTTTCACGGGATGTTTACTCCGCATGTG
CCAATGTCGGACTCGATCCACTGTTCGGCTTTTTCCATACGATGGAGCCGGGCAGAC
CAGCTTTGGCACTCGATCTGATGGAACCGTTCCGCGCCTTGATTGCCGATAGCGTAG
CGATACGTACCTTGAATACGGAGGAACTCACCCTCGGGGACTTTTATTGGGGAAAA
GACAGTTGTTATTTGAAAAAGGCAGGAAGACAAACGTATTTCGCTGCCTATGAAAG
ACGGATGAACGAGACGCTGACGCATCCGCAATTTGGGTATAAGCTCAGCTATCGCC
GTATGCTGGAGCTGGAAGCAAGGTTTTTGGCCCGGTATCTGGATGGAGAGCTGGTG
GAATATACGCCGCTCATGACAAGGTAGGAAATGACCATGCGACAATTTGTTCTGGTA
AGCTATGATATTGCCGATCAAAAACGTTGGAGAAAAGTATTCAAGCTGATGAAGGG
GCAAGGCGAGCACGTCCAGTACTCGGTGTTTCTGTGCCAACTCACCGAGATTCAGCA
AGCCAAGCTAAAGGTAAGCCTGGCGGAGCTGGTTCACCATGGAGAAGACCAGGTCA
TGTTTGTAAAAATCGGCCCAGTGACGAGAGATCAACTGGACAAGCGGATATCTACT
GTTGGCAGGGAGTTTCTGCCTCGCGATTTGACCAAATTTATCTATTAAGGAATGAAG
AAAGCTAGTTGTAACAAAAGTGGAAAAAGAGTAAAATAAAGGTGTCAGTCGCACGC
TATAGGCCATAAGTCGACTTACATATCCGTGCGTGTGCATTATGGGCCCATCCACAG
GTCTATTCCCACGGATAATCACGACTTTCCACTAAGCTTTCGAATTTTATGATGCGAG
CATCCTCTCAGGTCAAAAAAGCCGGGGGATGCTCGAACTCnTGTGGGCGTAGGCTT
TCCAGAGTTTTTTAGGGGAAGAGGCAGCCGATGGATAAGAGGAATGGCGATTGAAT
TTTGGCTTGCTCGAAAAACGGGTCTGTAAGGCTTGCGGCTGTAGGGGTTGAGTGGGA
AGGAGTTCGAAAGCTTAGTGGAAAGCTTCGTGGTTAGCACCGGGGAGAAGTCATTT
AATAAGGCCACTGTTAAAAGTTCGAAAGCTTAGTGGAAAGCTTCGTGGTTAGCACG
CTAAAGTCCGTCTAAACTACTGAGATCTTAAATCGGCGCTCAAATAAAAAACCTCGC
TAATGCGAGGTTTCAGC (SEQ ID NO: 63)
>D-locus
GAAGTTATGTTGATAAAATGGTTTATGAAAACGTGAGTCTGTGGTAGTAT
TATAAACAATGATGGAATAAAGTGTTTTTTGCGCCGCACGGCATGAATTCAGGGGTT
AGCTTGGTTTTGTGTATAAATAAATGTTCTACATATTTATTTTGTTTTTTG
AAATGCAACTGAAAGCCGCATCTAGAGCACCCTGTAGAAGACAGGGTTTTGAGAAT
AGCCCGACATAGAGGGCAATAGACACGGGGAGAAGTCATTTAATAAGGCCACTGTT
AAAAGT1TTGAGAATAGCCCGACATAGAGGGCAATAGACTTTTGCTTCGTCACGGAT
GGACTTCACAATGGCAACAACGTTTTGAGAATAGCCCGACATAGTTATAGAGATGT
ATAAATATAACCGATAAACATTGACTAATTTGTTGAAGTCAGTGTTTATCGGTTTTTT
GTGTAAATATAGGAGTTGTTAGAATGATACTTTTTGCCTAATTTTGGAACTTTATG
GATATAAGATAGACTTGATAAAAAGGTAAAAGAAAGGTTAAAGAGCATGGCAGGA
ATAGTGACCTGTGATGAAGATGATGGTAGAATTAAAAGTGTTCTTAAAGAAAAACA
ATATTGGATAAGGAAAATAATTCAATAGATAAAAAATTTAGGGGGAAAAATGAAAA
TATCAAAAGTCGATCATACCAGAATGGCGGTTGCTAAAGGTAATCAACACAGGAGA
GATGAGATTAGTGGGATTCTCTATAAGGATCCGACAAAGACAGGAAGTATAGATTT
TGATGAACGATTCAAAAAACTGAATTGTTCGGCGAAGATACTTTATCATGTATTCAA
TGGAATTGCTGAGGGAAGCAATAAATACAAAAATATTGTTGATAAAGTAAATAACA
ATTTAGATAGGGTCTTATTTACAGGTAAGAGCTATGATCGAAAATCTATCATAGACA
TAGATACTGTTCTTAGAAATGTTGAGAAAATTAATGCATTTGATCGAATTTCAACAG
AGGAAAGAGAACAAATAATTGACGATTTGTTAGAAATACAATTGAGGAAGGGGTTA
AGGAAAGGAAAAGCTGGATTAAGAGAGGTATTACTAATTGGTGCTGGTGTAATAGT
TAGAACCGATAAGAAGCAGGAAATAGCTGATTTTCTGGAGATTTTAGATGAAGATTT
CAATAAGACGAATCAGGCTAAGAACATAAAATTGTCTATTGAGAATCAGGGGTTGG
TGGTCTCGCCTGTATCAAGGGGAGAGGAACGGATTTTTGATGTCAGTGGCGCACAA
AAGGGAAAAAGCAGCAAAAAAGCGCAGGAGAAAGAGGCACTATCTGCATTTCTGTT
AGATTATGCTGATCTTGATAAGAATGTCAGGTTTGAGTATTTACGTAAAATTAGAAG
ACTGATAAATCTATATTTCTATGTCAAAAATGATGATGTTATGTCTTTAACTGAAATT
CCGGCAGAAGTGAATCTGGAAAAAGATTTTGATATCTGGAGAGATCACGAACAAAG
AAAGGAAGAGAATGGAGATTTTGTTGGATGTCCGGACATACTTTTGGCAGATCGTG
ATGTGAAGAAAAGTAACAGTAAGCAGGTAAAAATTGCAGAGAGGCAATTAAGGGA
GTCAATACGTGAAAAAAATATAAAACGATATAGATTTAGCATAAAAACGATTGAAA
AGGATGATGGAACATACTTTTTTGCAAATAAGCAGATAAGTGTATTTTGGATTCATC
GCATTGAAAATGCTGTAGAACGTATATTAGGATCTATTAATGATAAAAAACTGTATA
GATTACGTTTAGGATATCTAGGAGAAAAAGTATGGAAGGACATACTCAATTTTCTCA
GCATAAAATACATTGCAGTAGGCAAGGCAGTATTCAATTTTGCAATGGATGATCTGC
AGGAGAAGGATAGAGATATAGAACCCGGCAAGATATCAGAAAATGCAGTAAATGG
ATTGACTTCGTTTGATTATGAGCAAATAAAGGCAGATGAGATGCTGCAGAGAGAAG
TTGCTGTTAATGTAGCATTCGCAGCAAATAATCTTGCTAGAGTAACTGTAGATATTC
CGCAAAATGGAGAAAAAGAGGATATCCTTCTTTGGAATAAAAGTGACATAAAAAAA
TACAAAAAGAATTCAAAGAAAGGTATTCTGAAATCTATACTTCAGTTTTTTGGTGGT
GCTTCAACTTGGAATATGAAAATGTTTGAGATTGCATATCATGATCAGCCAGGTGAT
TACGAAGAAAACTACCTATATGACATTATTCAGATCATTTACTCGCTCAGAAATAAG
AGCTTTCATTTCAAGACATATGATCATGGGGATAAGAATTGGAATAGAGAACTGAT
AGGAAAGATGATTGAGCATGATGCTGAAAGAGTCATTTCTGTTGAGAGGGAAAAGT
TTCATTCCAATAACCTGCCGATGTTTTATAAAGACGCTGATCTAAAGAAAATATTGG
ATCTCTTGTATAGCGATTATGCAGGACGTGCATCTCAGGTTCCGGCATTTAACACTG
TCTTGGTTCGAAAGAACTTTCCGGAATTTCTTAGGAAAGATATGGGCTACAAGGTTC
ATTTTAACAATCCTGAAGTAGAGAATCAGTGGCACAGTGCGGTGTATTAACCTATATA
AAGAGATTTATTACAATCTATTTTTGAGAGATAAAGAGGTAAAGAAGCCGTTCAACAC
CTTCATTAAAAAATATAAGAAGTGAAGTTTCGGACAAAAAACAAAAGTTAGCTTCA
GATGATTTTGCATCCAGGTGTGAAGAAATAGAGGATAGAAGTCTTCCGGAAATTTGT
CAGATAATAATGACAGAATACAATGCGCAGAACTTTGGTAATAGAAAAGTTAAATC
TCAGCGTGTTATTGAAAAAAATAAGGATATTTTCAGACATrATAAAATGCTTTTGAT
AAAGACTTTAGCAGGTGCTTTTTCTCTTTATTTGAAGCAGGAAAATTTATTCCGAAG
GGTAAGGCAACACCTATACCATACGAAACAACCGATGTTAAGAATTTTTTGCCTGAA
TGGAAATCCGGAATGTATGCATCGTTTGTAGAGGAGATAAAGAATAATCTTGATCTT
CAAGAATGGTATATCGTCGGACGATTCCTTAATGGGAGGATGCTCAATCAATTGGCA
GGAAGCCTGCGGTCATACATACAGTATGCGGAAGATATAGAACGTCGTGCTGCAGA
AAATAGGAATAAGCTTTTCTCCAAGCCTGATGAAAAGATTGAAGCATGTAAAAAAG
CGGTCAGAGTGCnTGATTTGTGTATAAAAATTTCAACTAGAATATCTGCGGAATTTA
CTGACTATTTTGATAGTGAAGATGATTATGCAGATTATCTTGAAAAATATCTCAAGT
ATCAGGATGATGCCATTAAGGAARRGTCAGGATCTLCGTATGCTGCGTTGGATCATT
TTTGCAACAAGGATGATCTGAAATRRGATATCTATGTAAATGCCGGACAGAAGCCTA
TCTTACAGAGAAATATCGTGATGGCAAAGCTTTTTGGACCAGATAACATTTTGTCTG
AAGTTATGGAAAAGGTAACAGAAAGTGCCATACGAGAATACTATGACTATCTGAAG
AAAGTTTCAGGATATCGGGTAAGGGGAAAATGTAGTACAGAGAAAGAACAGGAAG
ATCTGCTAAAGTTCCAAAGATTGAAAAACGCAGTAGAATTCCGGGATGTTACTGAAT
ATGCTGAGGTTATTAATGAGCNTRAGGACAGTTGATAAGTTGGTCATATCTTAGGG
AGAGGGATCTATTATATTTCCAGCTGGGATTCCATTACATGTGTCTGAAAAACAAAT
CTTTCAAACCGGCAGAATATGTGGATATTCGTAGAAATAATGGTACGATTATACATA
ATGCGATACTTTACCAGATTGTTTCGATGTATATTAATGGACTGGATTTCTATAGTTG
TGATAAAGAAGGGAAAACGCTCAAACCAATTGAAACAGGAAAGGGCGTAGGAAGT
AAGATAGGACAATTTATAAAGTATTCCCAGTATTTATACAATGATCCGTCATATAAG
CTTGAGATCTATAATTTTAGGATTAGAAGTTTTTGAAAACATTGATGAACATGATAAT
ATTACAGATCTTAGAAAGTATGTGGATCATTTTAAGTATTATGCATATGGTAATAAA
ATGAGCCTGCTTGATCTGTATAGTGAATTCTTCGATCGTTTCTTTACATATGATATGA
AGTATCAGAAGAATGTAGTGAATGTGTTGGAGAATATCCTTTTAAGGCATTTTGTAA
TTTTCTATCCGAAGTTTGGATCAGGAAAAAAAGATGTTGGAATTAGGGATTGTAAAA
AAGAAAGAGCTCAGATTGAAATAAGTGAGCAGAGCCTCACATCGGAAGACTTCATG
TTTAAGCRTGACGACAAAGCAGGAGAAGAACICAAAGAAGTTTCCGGCAAGGGATGA
ACGTTATCTCCAGACAATAGCCAAGTTGCTCTATTATCCTAACGAAATRGAGGATAT
GAACAGATTCATGAAGAAAGGAGAAACGATAAATAAAAAAGTTCAGTTTAATAGAA
AAAAGAAGATAACCAGGAAACAAAAGAATAATTCATCAAACGAGGTATTGTCTTCA
ACTATGGGTTATTTATTTAAGAACATTAAATTGTAAAAAAGATTCGTTGTAGATAAT
TGATAGGTAAAAGCTGACCGGAGCCTTTGGCTCCGGACAGTTGTATATAAGAGGAT
ATTAATGACTGAAAATGATTTTTGTTGGATTTTTAGTCAGTTTTTTCTGTGGAAA
CGAATATGATGAGTATGCATATGGCAGTAAGAGCTGTAGAAGGCGAGAATACATATG
ATTACATTACTAAGGAAGAAAGACCGGAACTTAATGACGAATATGTAGCGAGACGT
TGCATTTTCGGTAAAAAAGCAGGAAAAATATCCAGGTCGGATTTTAGTAGGATAAG
ATCTGCGTTGGATCATGCGATGATAAATAATACACATACAGCATTTGCCAGATTTAT
CACTGAAAATCTGACGAGACTCAATCACAAAGAACATTTTCTGAATGTGACACGTGC
ATATTCTAAACCTGATTCTGAAAAATTGATACAACCGAGATACTGGCAGTCGCCTGT
AGTTCCAAAGGATAAACAAATATATTATAGCAAGAATGCGATTAAAAAATGGTGTG
GTTACGAAGATGATATTCCGCCTCGTTCTGTGATAGTTCAGATGTGTCTATTGTGGG
GGACTGATCATGAAGAGGCAGATCATATCCTTCGCAGTTCAGGATACGCGGCGCTTA
GTCCTGTTGTACTTCGAGATCTTATCTATATGTATTATCTGGATCATCAGGATTTGCA
AAAAAATGAGTTGATATGGGAAGTAAAAAAGCAGTTGGATCACTTCGATTTGACAA
ATAGAAATTATGATACAAATCCTTTTGATGTAGGGGGCAGCGTAAATGATCATATCT
GTGAACTGAGCGAGCATATAGCGAAGGCTCATTATATTTATGAGAGGGCTAAGGAA
GGACCATTGCAAAATGTAATTCGGGATATTTTGGGAGATACACCTGCCCTTTATTCT
GAAATGGCATTTCCTCAGCTAGCATCTATAAACAGGTGTGCTTGCAATTCGCTTTCTT
CATATCAAAAAAATATTTTTGATACTGACATAGCTATATATGCAGATGAAAAGGACA
CAAGAGGTAAATCAGACCGTATCCTTGTTGAGGGCGCATCTTCGAAATGGTATGAAT
TGAAGAAACGCGATGCTAATAATGTCAAAATTTCTGAAAAGCTGAGTATACTCAAT
ACTATTCTTAAATTTAATAGTGTTTTTTGGGAAGAATGTTACCTTGATGGAAATATAA
AACAATCGAGCGGAAAGCGATCTGAGGCAGGAAAAATTCTTTATGGTCGCGACAAC
GGAAAAGAAAATGTCGGAGTTTCAAAATTGGAATTGGTGCGGTATATGATAGCTGC
AGGTCAGGAACAAAATCTGGGAAATTACCTGGTGAGTTCAGGATTTTGGAGAAAAA
ATCATATGCTGTCATTATACAAGGCAATGATATAGCGCTTGATGAGATGGATGAAT
TGGATCTCTTAGACTATATTCTGATATATGCATGGGGATTTAGGGAAAATATCATTA
AAAAGAACAGTAATGTGAATTCTTTGGATGAAAAGACTAGAAAAGTGCAGTTTCCG
TTTATAAAGTTACTCATGGCAATTGCAAGAGATATCCAGATACTTATATGTTCAGCA
CATGAAAAAACAGTCGATGAGTCATCTCGAAATGCAGCAAAGAAGATAGATATATT
GGGAAATTATATTCCTTTTCAGATTCATCTTCAGAGAACTAAAAAAGATGGTGGAAG
AGTGGTAATGGATACATTGTGTGCTGATTGGATTGCGGATTATGAATGGTACATTGA
TCTTGAGAAAGGAACACTTGGATGAGCAGTGATGAAAGGATATTTAAAAAATTTTT
GGAAAAAGGATCGATTTCTGAGCAGAAAAAGATGCTTTTAGAAGAAAAGAAATGTT
CGGATAAACTAACTGCACTGCTTGGGAATTACTGCATACCGATAGACAATATTTCAG
AGTCAGACGGAAAAATATATGCGGTCTATAAGCTTCCAAAAAATGTTAAACCTTTGT
CCGAAATCATTAATGATGTATCCTTTTCTGATTGTACGATGAGAGTACGTTTGCTTCT
CATAAAGAGAATTCTGGAACTCGTGTGTGCTTTTCACGAAAAAAAATGGTATTGTCT
CAGTATTTCACCGGGAATGCTCATGGTTGAAGATTTTGATATACCGATGGGAAATGT
CGGAAAAGTATTGATATATGATTTCAGAAATCCTGTTCCGTTCGAGTCAGTAAATGA
AAGACATAATTTTAACGTTTCAAATAAATACACTTCACCGGAGCTGCTCATCCATTC
AAGATATGACGAGTCGAAATCTGTGAGTGAAAAATCAGATTTGTATTCTGTTGCAAA
AATTGCGGAAACAATAATAGGAGATTTTAACAGTATTATTGCAAATGGAAATTTGAT
ACTACTTGCAATGCTTAGAGTTTTTATCAGTACAGGGAAAAGTCCGGAACCTGAGTA
TCGGTTTGAATCGTCGGAAAATATGCTTTCAGTATTTGAAAATTTGATCAAAGAAAA
TTGTTTTTTTGAAAAAAACGATTATACATCTATGTTTCATCAGGCGTATGACAATTTT
TTTGAATGGCAGGAATGTTTGATATCACCGGATCACTTGGATAAAAATATGTTCGAG
GCAGCTTTATCAAATCTTGAGGATCAGCTGCTTAGGGTTGATATTGATAAGTATAGA
GCAGAGTACTTCTATAAGCTTCTCCGAGAGTTGTCTAATAAATATAAAAATACAATr
ACTGATGAACAAAAGGTAAGGTTGGCAATACTTGGAATCAGAGCGAAAAATAATCT
GGGAAAAAGTTTTGATGCATTGGAAATATATGAGTCAGTACGTGATTTAGAAACTAT
GTTGGAGGAGATGGCAGAGCTTAGTCCTGTCATTGCTTCGACATATATGGATTGCTA
CCGATATGCAGATGCGCAGAAAGTGGCGGAAGAAAACATTATCAGGCTTCATAATA
GTAATATTCGTATGGAGAAAAAAAGAATACTGCTTGGAAGGTCATATAGTTCAAAA
GGGTGCAGCATGGGGTTTCAGCATATTCTTGGTGCGGATGAGTCATTTGAACAGGCT
TTATATTTCTTTAACGAAAAGGACAATTTTTGGAAAGAAATATTTGAGAGCAGAAAT
TTAGAGGACAGCGATAGACTTATAAAGTCTTTACGAAGCAATACGCATATTACGCTG
TTTCATTACATGCAATATGCATGTGAAACAAGGAGAAAGGAATTATATGGAGCACTT
TCAGACAAATATTTTATAGGTAAAGAATGGACAGAAAGACTCAAAGCATATATAAG
CAACAAGGATATATGGAAAAACTATTATGAGATATATATTCTGCTAAAGGGTATTTA
TTGCTTCTATCCAGAAGTCATGTGTTCGTCTGCGTTTTATGATGAAATCCAAAAAATG
TACGATCTTGAATTTGAAAAGGAAAAAATGTTTTACCCATTGAGTCTGATAGAACTG
TATCTTGCTCTGATAGAGATAAAAGTTAATGGGAGTCTGACGGAGAATGCCGAGAA
GTTGTTTAAACAGGCATTGACACATGACAATGAAGTCAAAAAAGGAAATATGAATA
TTCAGACCGCCATTTGGTATCGAATATATGCACTGTATAACGATGTAAAAGATGAAA
CTGATAAGAATAAAAGGCTTTTAAAACGGCTTATGATTCTTTGCCGACGATTTGTT
GGGCGGATATGTATAGTGCTTTGGAGAAGGATGGGAAGTTAATTGATTTTTTGAGAT
TTGAGGTATGTTAAATGATAACACTTGCATTAGATGAAAATGGCAAATTTGAAGATG
CTTTTTCTAAAAAAAATGAAAAACCGATAATGATTGCGGGGATAATCTATGATGACA
AGGGGAAAGAGTATGATGCTGAGAATGAACGCTACAGGATATCCAGTTATCTGCGA
GCAGTATGTGACAGTTTGGGTGCGAAATACCCTCAGGATCTACATTCAAATAGTAAT
GGAAATAAGGCGACTGTTGGGAAAGTAAAATGTAAAATTGGTGAAACACTAAAGGA
ATTCTTGAGAGAAGGAACCTATGAAAAAAAGGAATTGCCGACAAAGAACGGTTATT
TAAATAAGAGATCTGGAAAATATGTAATGTTTGCAGAACTCAGGAGTAGTCAGGGA
GTTAAAAAGCGTGTTAGTGGTTGGAATGACAATGATCTGACTCAGGATGAAAAGGT
CAGCAATCTGTACCTTCATATGGCAGAAAATGCCGTTGTCAGAATGCTCTTCCATAA
TCCTATATATGAAGATGTAACAGATGTAAATCTCTATTTTCCCACGCGAAAAGTTGT
TCTGAAAGATAGAGATAGAGAATACGATAAACAAGATTTCAAAATATATGGTGATA
AGGACAAGTGCGAAGCAGAAAGCGGGAGATTGGTGCATTATGATATCGTGTCATCG
GATTTTTACCGTACGATAATGGAGAACGAATGTACAAGAATTAATAAAAAGCAATT
AAATGTTCATTATATGAACACAAGCCCAATTTCGTACTGGGAGAAAAATGAAAAAT
ATAATACATTTTTATATTTGGCTGACATAGTTTGTTCTATGCTGGAGGTGAAGTCCA
GGTTTTCGAGTCCGGCAGAGTGGATGGATTCTTTTGCCGAATGGGGAAACAAATATTT
TGGTGATGATCAGATAATCTTATTTGGGTATGATGATATAGATGACAAATACATGGA
GGCTGTAGATGCAGTAGGACAGGGAGAGTATTTTCATGCGCTGGATATTATATATGA
TGCGGAATGTAGTGGAAGTGAATTTGAGAAGCACTACAAAGATTATTGGTTTCCAA
AGCTTATAAAAAAGATACGAATAACAGCAACTGTGGATAATTTATGCAGATCGATC
TCAGATCTGGAGAGTTTTACATATCGAAGTAATCTTGATCAGCAGAAACTTTTGTGG
ATTTTTGAGGAAATCAAAGCTATCGTCGATAAGGGAGATTTTGGAAAGAAATATCAT
ACAGATCAGGTTATGTTTGATATGTGTAATGCCGGTATTGCTGTGTACAATCATATC
GGAGATTTTGGGACTGCAAAGGAATACTATGATGAGTGCATGAAACACACTGGGGA
TGTGGATCTGGTAAAGATACTTCGTGCATCAAATAAAATGGTGGTCTTTCTTGACGA
TGCTTTTAGGTATGGTGACGCGACAGAACGTGCCAGGAAGAATGTTGAATACCAAA
AAGCTTTGCACGATATAAAGAGTGAGATTTGTCCGGAAAAGAAAGATGAAGACTTG
AACTATGCCATATCGCTCAGTCAATTTGGACAGGCGCTTGCGTGTGAAAAAAATTCT
GATGCAGAGAGTGTTTTCCTAGAGTCGTTGCGGCATATGAGGAAAGGGACTGCCAA
TTATCAGATTACTCTTTCATATTTACTCCATTTTTATCTGGATATCCCGGTAATCA
TCTTATCGAGAAAAAACAAAGGACTATTTTGGAAGTGAAAAACCAAAGGAACAGCT
GAAAGAATTGCTGAAGTTATCGGGAAAGGATGATAGTATAGTTACTTTCAAATTTGC
AATGTATGTCTATTTACGTGCACTTTGGGTATTACAGGAACCGCTTACTGATTTTATC
AGAACAAGATTAGAGGACATACGTGAGACTCTTGTAAAGAAGAAAATGAGTGAACA
TATGGTTGGACATCCGTGGGAGTTGATTTATAAATATCTGGCATTTCTTTTTTATCGT
GATGGAAATTGTGAAGCTGCTGAAAAATATATTCATAAAAGTGAAGAGTGC1TGGA
AACACAAGGACTGACTATAGATGCGATTATTCATAATGGTAAGTATGAATATGCAG
AATTGTCAGGTGACGAGGAGATGATGGCAAGAGAGAAAGCGTACTTTGATGAAAAA
GGGATAGATAGAAAAAATGTTTGTACTTTTATGTATCATTGATGTTTAATAAGATTT
GACCGAGGAGTGACAGGTAATCGCCGGTATATCTGGTATTACCTGTCATTTTTTGAT
GAAATAAGCTACTTTTTGCCTAAAAAACGAAACTGTTGGTGTTTTATGATGATTGTG
TCAACAAAAGAGAGCAAAAGAAGAGGAGAAAAGTAATGTCAATGATTrCATGTCCG
AATTGTGGTGGAGAGATATCTGAAAGGTCAAAGAAATGTGTTCATTGTGGATATGTG
TTAGTCGAAGAAGCTAAAGTAGTGTGCACAGAATGTGGAACTGAGGTAGAGAGTGG
CGCTGCTGTATGTCCGAAGTGCGGCTGTCCTGTAAATGATAGTGAGACGCCTCAGAA
AGTTGAAGTGACTAGGGTAAATGTATCTTCCGTAATCAGCAAAAAAGTCGTrGTAAG
CATACTGATCGCAGTGATTACAATTGCAGGTTTTTTCTATGGAGTGAAGTATTCGCA
GGAAAAGAAAGCAATTGAAGAGTCAGTAAAGCAGAAGGAAGACTATCAAAGTACG
CTAGAGCTTGCTTCGCTAATGATGCTTCAAGGAGCTTCGGATGCAGAAACTTGTGGG
AATTTGGTTAGGAAAGTGTGGAGCAACTGCATTTATAAGGAGAGGGATGAAGAAAC
CGACAAGTATACGTGTGATAGCAGGGGTGCAGGATGGTTTTATGATGATTTTAATGA
TGCATTAATGGCTCTTTACAGTGACAGCAGTTTTGGCAAGAAGATAAATGAAATCAA
AAACGGTCAGGAAACCGTTGCGGCGATGATGAAAGATCTGAAAAATCCGCCGGATG
AGATGGCAGATGCCTATGAGGATATTCAAAATTTTTATGTGTCCTATCTAACGCTGA
CAGAAATGGTTGTGAATCCAACTGGAAGTTTGAGTTCTTTTTCATCTGATTTTTCCGA
TGCGGATACGGAGGTGTCCAATGCCTATAGCCGGATGAAGTTGTATTTAGATTAAAC
TATTGAGGAAAAAATGGAGGTGCTTTAATGCGGGGGAGAAACTGTGGAGGGTCATC
AGGCGACGGACTGCTGGTACTTCTCGTACTGCTTGTCCTTTTTTATAAAATCATGCCA
TTCATAGGTTTATGGATTTTAATTTTTGGTGATGCTGAACGTAAAGATCTGGGTATGG
GTATGATTATTGTCGGGATAGTTCTATATGTATTATTAGAGGTTTTTTAATGTGAGTT
TCTGTGGTAAACTATAAAAGTACAAGCTTTTGCGCCGCACCGCATAAATAGCGGATT
TATGACCATTATTTGGTGAAAAAAATGGTGTACACCTGTGTTTTTTTGTTTTGCGCCG
CAAAATGCGCCACGGAACCGCATGCAGAGCACCCTGCAAGAGACAGGGTTATGAAA
ACAGCCCGACATAGAGGGCAATAGACACGGGGAGAAGTCATTTAATAAGGCCACTG
TTAAAAGTTATGAAAACAGCCCGACATAGAGGGCAATAGACATAAAGACCAAAAAC
AGGTCATCTGCATACTGTGTTATGAAAACAGCCCGATATAGAGGGTGTGAGAGATA
TAGTTCTCGTCACAGTGCAGAAAATGACCTATTATGTGCCGAAAAACAAAATGAAA
AAAGAATGGAAAGGCGTATTTAATGAAATGCTGATCTGTTGATTTGAATTAACAAA
AAAAGGTCGCCCCACGGATGACAAAAACATCCGGGGGCGACCCTTTT (SEQ ID NO:
64)
>E-locus
TACTGTGTGCATAAGTCTTCCTTAGATCCATAGGTACAGCAGTTTTATTTA
TTAGCCTTAGAAAATGGAAAATAGAGCTTATAAATGATATGATATTTATGAATAAAA
TGATTGCATTCTCGTGCAAACTTTAAATATATTGATTATATCCTTTACATTGGTTGTT
TTAATTACTATTATTAAGTAGGAATACGATATACCTCTAAATGAAAGAGGACTAAAA
CCCGCCAAAAGTATCAGAAAATGTTATTGCAGTAAGAGACTACCTCTATATGAAAG
AGGACTAAAACTTTTAACAGTGGCCTTATTAAATGACTTCTGTAAGAGACTACCTCT
ATATGAAAGAGGACTAAAACGTCTAATGTGGATAAGTATAAAAACGCTTATCCATC
ATTTAGGTGTTTTATTTTTTTGTGATTATATGTACAATAGAAAGGTCCAGGTAC
TTGAGGTGAAAACTATGAGAATTACTAAAGTAGAGGTTGATAGAAAAAAAGTACTA
ATTTCTAGGGATAAAAACGGGGGCAAGTTAGTTTATGAAAATGAAATGCAAGATAA
TACAGAACAAATCATGCATCACAAAAAAAGTTCTTTTTACAAAAGTGTGGTAAACA
AAACTATTTGTCGTCCTGAACAAAAACAAATGAAAAAATTAGTTCATGGATTATTAC
AAGAAAATAGTCAAGAAAAAATAAAAGTTTCAGATGTCACTAAACTTAATATCTCA
AATTTCTTAAATCATCGTTTCAAAAAAAGTTTATATTATTTTCCTCCTAAGAATTTAA
ACAAAAGCGAAGAATACAGAATAGAAATAAATCTCTCCCAATTGTTAGAAGATAGC
TTAAAAAAACAGCAAGGGACATTTATATGTTGGGAATCTTTTAGCAAAGACATGGA
ATTATACATTAATTGGGCGGAAAATTATATTTCATCAAAAACGAAGCTAATAAAAA
AATCCATTCGAAACAATAGAATTCAATCTACTGAATCAAGAAGTGGACAACTAATG
GATAGATATATGAAAGACATTTTAAATAAAAACAAACCTTTCGATATCCAATCAGTT
AGCGAAAAGTACCAACTTGAAAAATTGACTAGTGCTTTAAAAGCTACTTTTAAAGA
AGCGAAGAAAAACGACAAAGAGATTAACTATAAGCTTAAGTCCACTCTCCAAAACC
ATGAAAGACAAATAATAGAAGAATTGAAGGAAAATTCCGAACTGAACCAATTTAAT
ATAGAAATAAGAAAACATCTTGAAACTTATTTTCCTATTAAGAAAACAAACAGAAA
AGTTGGAGATATAAGGAATTTAGAAATAGGAGAAATCCAAAAAATAGTAAATCATC
GGTTGAAAAATAAAATAGTTCAACGCATTCTCCAAGAAGGGAAATTAGCTTCTTATG
AGATTGAATCAACAGTTAACTCTAATTCCTTACAAAAAATTAAAATTGAAGAAGCAT
TTGCCTTAAAGTTTATCAATGCTTGTTTTGGAATCCTTTATTTATTCCGGAAGFCC
ATATCCTGTTTGCAAAAAGGATATATTAATGATAGGTGAATTTAAAAATAGTTTTAA
AGAAATAAAACACAAAAAATTCATTCGTCAATGGTCGCAATTCTTCTCTCAAGAAAT
AACTGTTGATGACATTGAATTAGCTTCATGGGGGCTGAGAGGAGCCATTGCACCAAT
AAGAAATGAAATAATTCATTTAAAGAAGCATAGCTGGAAAAAATTTTTTAATAACC
CTACTTTCAAAGTGAAAAAAAGTAAAATAATAAATGGGAAAACGAAAGATGTTACA
TCTGAATTCCTTTATAAAGAAACTTTATTTAAGGATTATTTCTATAGTGAGTTAGATT
CTGTTCCAGAATTGATTATTAATAAAATGGAAAGTAGCAAAATTTTAGATTATTATT
CCAGTGACCAGCTTAACCAAGTTTTTACAATTCCGAATTTCGAATTATCTTTACTGAC
TTCGGCCGTTCCCTTTGCACCTAGCTTTAAACGAGTTTATTTGAAAGGCTTTGATTA
CAGAATCAAGATGAAGCACAACCGGATTATAATCTTAAATTAAATATCTATAACGA
AAAAGCCTTTAATTCGGAGGCATTTCAGGCGCAATATTCATTATITAAAATGGTTTA
TTATCAAGTCTTTTTACCGCAATTCACTACAAATAACGATTTATTTAAGTCAAGTGTG
GATTTTATTTTAACATTAAACAAAGAACGGAAAGGTTACGCCAAAGCATTTCAAGAT
ATTCGAAAGATGAATAAAGATGAAAAGCCCTCAGAATATATGAGTTACATTCAGAG
TCAATTAATGCTCTATCAAAAAAAGCAAGAAGAAAAAGAGAAAATTAATCATTTTG
AAAAATTTATAAATCAAGTGTTTATTAAAGGTTTCAATTCTTTTAAAGGTCCATTA
GATTAACCTATATTTGCCATCCAACCAAAAACACAGTGCCAGAAAATGATAATATA
GAAATACCTTTCCACACGGATATGGATGATTCCAATATTGCATTTTGGCTTATGTGTA
AATTATTAGATGCTAAACAACTTAGCGAATTACGTAATGAAATGATAAAATTCAGTT
GTTCCTTACAATCAACTGAAGAAATAAGCACATTTACCAAGGCGCGAGAAGTGATT
GGTTTAGCTCTTTTAAATGGCGAAAAAGGATGTAATGATTGGAAAGAACTTTTTG
GATAAAGAAGCTTGGAAAAAGAACATGTCCTTATATGTTTCCGAGGAATTGCTTCAA
TCATTGCCGTACACACAAGAAGATGGTCAAACACCTGTAATTAATCGAAGTATCGAT
TTAGTAAAAAAATACGGTACAGAAACAATACTAGAGAAATTATTTTCCTCCTCAGAT
GATTATAAAGTTTCAGCTAAAGATATCGCAAAATTACATGAATATGATGTAACGGA
GAAAATAGCACAGCAAGAGAGTCTACATAAGCAATGGATAGAAAAGCCCGGTTTAG
CCCGTGACTCAGCATGGACAAAAAAATACCAAAATGTGATTAATGATATTAGTAATT
ACCAATGGGCTAAGACAAAGGTCGAATTAACACAAGTAAGGCATCTTCATCAATTA
ACTATTGATTTGCTTTCAAGGTTAGCAGGATATATGTCTATCGCTGACCGTGATTTCC
AGTTTTCTAGTAATTATATTTTAGAAAGAGAGAACTCTGAGTATAGAGTTACAAGTT
GGATATTATTAAGTGAAAATAAAAATAAAAATAAATATAACGACTACGAATTGTAT
AATCTAAAAAATGCCTCTATAAAAGTATCATCAAAAAATGATCCCCAGTTAAAAGTT
GATCTTAAGCAATTACGATTAACCTTAGAGTACTTAGAACTTTTTGATAACCGAT
AAAGAAAAACGAAATAACATTTCACATTTTAATTACCTTAACGGACAGTTAGGGAA
CTCTATTTTAGAATTATTTGACGATGCTCGAGATGTACTTTCCTATGATCGTAAACTA
AAGAATGCGGTGTCTAAATCTTTGAAAGAAATTTTAAGCTCTCATGGAATGGAAGTG
ACATTTAAACCACTATATCAAACCAATCGGTAACATTGGCCTGGCAACAATGGCTAA
AAAAAAATACACCACTTAGGTGAAAAAAGTACTGTTTCTTCAAATCAAGTTTCTAAT
GAATACTGTCAACTAGTAAGAACGCTATTAACGATGAAGTAATTCTTTTAAAGCACA
TTAATTACCTCTAAATGAAAAGAGGACTAAAACTGAAAGAGGACTAAAACACCAGA
TGTGGATAACTATATTAGTGGCTATTAAAAATTCGTCGATATTAGAGAGGAAACTTT
AGATGAAGATGAAATGGAAATTAAAAGAAAATGACGTTCGCAAAGGGGTGGTGGTC
ATTGAGTAAAATTGACATCGGAGAAGTAACCCACTTTTTACAAGGTCTAAAGAAAA
GTAACGAAAACGCCCGAAAAATGATAGAAGACATTCAATCGGCTGTCAAAGCCTAC
GCTGATGATACAACTTTAAAAGGAAAAGCAGTGGATTCTTCACAAAGATACTTTGAT
GAAACGTATACTGTTATTTGTAAAAGTATCATAGAAGCATTAGATGAAAGCGAAGA
GAGATTACAACAATATATTCATGATTTTGGAGATCAAGTGGATTCTTCACCTAACGC
ACGAATTGATGCGGAATTACTACAAGAAGCAATGAGTAGGTTAGCTGACATAAAGC
GGAAGCAAGAAGCACTTATGCAATCCTTATCTTCTTCTACAGCAACGCTTTACGAAG
GCAAGCAACAAGCGTTACACACTCAATTCACGGATGCGCTGGAGCAAGAAAAAATA
TTGGAACGCTATATTACTTTTGAACAAACTCACGGGAATTTTTTTGACTCATTTG
AACTTGTCTATCGAACGGGACAAGCAGTGCGTGAATTAGCTAATAACGTCACATTCG
AGAGCCAAACAGGAAGCTATCATTTTGATAAAATAGATGCTTCTAGATTCCAAACTT
TGCAAGAAATGTTGCCAAAGGCAAAGAAAAAAGCATTTAATTTTAATGACTACCAA
ATAACATGGAATGGCACCACGCACCTTTTATGGAAAAATGGTAAAGTGGATGCAGA
AGCAACCAAAGCTTATAACGAGGCGAAACTGAATGGAAAGCTACCAAAGGAAGGT
AATGTAGCAACACAAGATGCAGAACTATTAAAAGGCATTTTGGCTTCACTGAAAAA
CAAGAAAGATCCTATCACTGGAGCAGATATAAGCAGTGTGCATGTATTATCTATCCT
TAGCGGGCTCGCATTCTCCTATACAGCTGGGAATTATAAGGGAAGAAAACTTACTGT
TCCAAAAAGTTTCTTAGACAAATTAAAGAAAAACCGAAAATCTAAAGTACCTAAAC
TATCTAGTTTATCAGAAAAACAACAACTAAAACTCGCAAATAAATACAAGAAAAAA
TCACCTATTCCAATTCCAGATGATGCTAAAATCAAAGCTCAGACGAAAAAGGCTGGT
TATGAACAAATATCTTATAAATGGAAAGAGAATGGGATAACCTTTGAAGTTAGATG
GCATACTAGGACACCAGGTGCACCAAAGGAACAAGGAAATACGTTTGTTATAGAAA
GAAAAATTCAGGGTACAGCAGAAGGGAAAACAAAAGTTCAACAAATATTGGTTGGA
GATAATAAGTGGGTGAGTAAAAGTGAGTGGCAAAAGGCTATAACTGATAAGAAAA
ATGGTGTAAGTACCTCGGAGCAAAATAAAATGTTGTCTGATGGACATTGGAAAGAA
TAGAAAGGAGCAAAATGATGGAAGATTATTATAAAGGTTTTGAGGGATATCCAGAG
ATAGATTTTTATACGTATATAGATGATATGAAATTGGGTATAGCAATGTGGGAAGGA
TACTTTGACAACATTATGAAAGAAATTAATCCAAGTAACGGAAGATGGACTTCATTA
GCGTATTATTATCATTTAGATGAGGGGTGGTATGATGAAAGTCCTTGGGAAATACCA
AGTAATACAGAAGCATTAGAATTATTGGAAACAATCCATATATCTAATCTAGATACT
ATCACACAAGAGATATTACTTAAATTAATAAATTTATTAAAGAAGAATATAAATAG
ACAAGTTTATATTGAATACTCATAAAAAAGATGATTATGATATATTATAGAACAAAC
GAACAAGCCCCAAATACGAGGTTTGTTCGTTTGTTTTCAATATAATTATTTGCCACCA
AGTGAGATATTACGGTTTTAAATAGOTATrTGACGATACCAAACCCTGATAAGAGA
AAGAAGAAAGAGAAAGCTGGTGTAGTTGTTTTAAGTGAACTAGATAAAAAATTAAT
AGCAAAACTTGAAAAAGATGGTGTGAAAATATCAAAAGAAGATGTTATAGGAATAA
AATAATTGCCAGATGATGAGAAATCGTTTGGCTGGAAAAAGGAAATCCATCCGCTG
GATTTGAGCATATTCTTATTGAACATGGTGAACAATTTGCTAAATAGGGAATTTCAA
AAGCTGAGTTACCTGATTTTTTGATGACTGCTTTAGAAAAGGAAA (SEQ ID NO: 65)
>F-locus
ATTCTTTAAAAATATCTAATAATTTATTTACTATATACTCTAATACATCTTT
TAACCTATCTAAAACATCATCACCTACAACATCCCAAAAATCATCTAAAAAGTTAAA
AAAATCCATCTTTATCAACTCCTATATCTATTTTTTATTGTGTAATTCCTGAGTTACA
AAACCATTATAACACGTATTACACACGTAGTCAATACTTCAAAAAAATTTTTTGTAT
ATTTTTTTGAATAAGTAAATAAAAAGAGCTGTCGGCCTCAACCTAATTGACCAC
TTATTTTGTTAACAAACTTAGACAACATTAAATTTAGAAACCTATATATATTTCAG
CTTTTCATTTTTAGGTAGTCTAAATCAGAAATGGTTTTGTCTAAATGATGTATGTA
TTTTAGTCCCCTTCGTTTTTAGGGTAGTCTAAATCAGAAGTCATTTAATAAGGCCACT
GTTAAAAGTTTTAGTCCCCTTCGTTTTTAGGGTAGTCTAAATCCCATCCAAATTATGG
GATAATATGTTACTTTTTATTTTAATATTGGTTAATTCAACAGGTGGGGTAACACA
ATTACCCCTTTAATTTATTTTACCATATTTTTCTCATAATGCAAACTAATATTCC
ATTTTTGTTTCTTTTCTTATGATCTTCCTTACCGAGAGACCAAGGGTTCAAGTTGC
CATTTTTTTGAATTGATCTTCTGTTAGAATTAATGTTCTTACTGATGAATTTCAGAG
ACTATCATTGACAACTGATTTTCATGGAAGAGACCTAAATTTGAACAAGGTTGAGGAC
CAATGTATACTGATTTTTGTACCTCCGGAAAGTTGAACGGTGAAGTTACCAACAACA
TTTGCATATTCTTTTTTTTCTTTTCCTGTTTGCATTGGAAAATCATACCCAGGTGAC
TACATAATTAGTACTCATAATCCTCTATCCTTAACTCAGGAATTTCTACTTCTGACAT
TTCTCCTGTAAAATAATTTCTAATATTATCTAAAAAATAATCAATCACTTGAGCCAAT
TCATATTTTTTATTTTTCCAATAAACTTGGTTACCAAGTTGAAAGGTTAATTGCCAAG
TAATGATTTATTCAAACTTACTTCTTCCTGTTGATTAAAATATACGATATAATCTAC
ATTGGACGAAATATTTCAATAATATCATCTGCAAAATTATAATTATTAAATTGTGAA
CTGTGATGTATTCCCAAACTTGGATGAAATCCTTTAGCCACAATTTTTGAAGAGATT
AAGCTTCTCAAAACCATATACCCATAATTTAATGCCGAATTTGTCCCGTCTTCACCA
AATCTCTTAAATTTTTTCCCAAAAAGTTCACCAAAATACATTCTTGGGTTCAGAGA
CCTGATGTTCCGCTTCTTTTCCTTTTAATCTAATATTATTGGTTAATATTATGGAAGGA
TATGATACTTCCTGAGATTTTTTCAAAAACTGCAATAAATTTGGACCTAAAGGGTTG
TCTCATTACAATTTTTCTCCAGATTTCTTCTTTTTTATCGTCAATCCAGCTCCCGAGG
CATTAATTCnTGTTGTTACTTGAAAATGATTATACAGTCCTAATGAATGTAAAACTG
GCTGATGTTITrCATTACAAATTATCAGTGGAATATTATGTTCTGATAATCTTAACTG
TAATATTCCGCTAATTTTACATCTGCAATTTTCAACTACAATTGCCATGATATCATTT
AAAGATACTTTATCAGCCTTATTTTCATCATCTTCATTTATCATCACAAGCTGGTTAT
TTAAAACTGATAATTCATTGACTCTTGTTACATGGATAATATTAGACATTTTTATTAC
TCCTTTACTCTAAAGCTTTATATTCAAACATAACTTTCACAAGTTCACACAATTCT
TGAATTTCTATCAGTCATTAATTTTTTCTTTGGTTGAAATATTTAAAGCCCTTTAA
CCGATTCTAAAGTCTGAATTTCTATTTTCTTATCTGCTCCTATTTTAAATGTTGCTACA
AAACCATATTCCTTTAATATATCCACTATTGATTTCATAATTGCATTTTTATTAATTCCA
ATCATAAGAAAGTAATTTTCTTAAATTTTCCAGCACTTCTAAAAGTGAAATTTCAGC
ATGCGGAATATAGTTAAAATGTGCAATATAGTTTCGTATATACAAATCTTTTTTCTCT
TGTTTTAATTTTTTTACTTTTTTATCAGAATAAAGCCGTGGGTCAAGGGGAACGAGGA
TATAATTCTTTATAAAAATTTATATATTTTTCAAAATTTTTTCTTTGGTATCTGCTCC
ATTTTTACTGTTATCAAAATTAAATATTTCTTCAATATAATGATTTTCAGGAAATTCA
CCTTTCAATCTAAATCTTAAGTCCCTTTCCCAGATCGAAGTATATCCCACAAGTCTGT
GGAGTATTTTTAATAACAAGCCTTGCAACAAGTTTAATTCATTAAATTCCACTTTATT
TTTCAAATGAGTATATTTTTGTATATTTCCAATTGCTTTTTCATATTCTTTATTATT
CATCATTAAATTTTTCATCTTITITAGGTCTTGCATATTATTTTTTTTATTTTTATTG
ATTGTATAATTTTTTTCTATTTCATTTTTTTTATTGCTGTATTCCAGCTATTTTTTC
CTTATTTTATACTTCGCTTTATCAGCTATTTTTTCAAGTAAATTTAACATCCCA
TTTTATATTATAAAAAGCTCTATGCTTTATAATATTTTCTCCATCAAATATTTT
TTGTGTCAAATTTCTTCAATTCTTTCCTATCTTTTTCTAATTCAAAATCTCTCCATCA
AATTTTCCAATTTCATTCGCTTCTAATTCAAAATCTTCTGTTACTCTATTATTATCTAA
ATTTAAAAGATTTATAAGTTCAAGTTCATCTGAAAAAGTTTCAAATTAGTCAATT
TGATATTTTTCAAGACTTCCCTTCAAATTAGTCAATTCTTTATGATTAAGCAATTTTA
AAATTAAATAAAACATATTCAAATTTTCAGTGTATTTTAATATCTTTCCTAATTTTAT
CTCTCTTACAAATTCATTTATTTCATGTGGAATTTCTTTATTCCTATTGGAATTTCTTTA
AATTTTTTAAAATTTTATCATATTTTTCTTTATTGTTATTATTACTTTCCCTATTGGAAT
ATATATCATTATTATCATTGTTATTATTACTTTCTATATATTTTAAATTATTTGTATAA
AAATAATCTATAAAACCTTTTAAAAATATTTGTTGTATAAAATCAATGTATGTAT
TTTCTTCTTTATCTTGATTATTAATCATCTCCCTACTTTGTATAATAGCAAGATATTCT
ACTGGTACAGTTTTTTCTATATTTTCAAATTTACTTCATTAGTTATTTAAAGA
ATTTCTTTGTTTATTTATTTTTATTACTTCATTAGTTATTTTAAAGATAAATAT
TTITAACAAATTTATTAAGAAATTCACCATAATAAATATTTTTCAAAAGATATATTTG
AGCATCTTTTTCTTCTTTATCCTTAGGAACACTCCAAAAAAATTTTTTAACAAAAGG
AAATCTTCTATTTTATTATATAATTTCGTAAAAGAAGGAACAAAAGGAATATTCTTA
TTACAAAATTAAATTTTGTATTTTTTAAATATTTAATTATCACATCCTTTTCATAATA
ATTAAATACATTTGCACTATTTAACTGCTTAAATATCTTCAATTTCAAGGAGGTA
TTATTTCATTTTGAAACATTTTTTTTGAAATTTAGGCTTCGTGGGTAAGAGGCCTA
AAATATATCTTTCCCTTCTAATTCCAAATTAAAATGCACAATCCCATGTCTAATACTG
CTAATAGCTTCATCAATATTTGCAAAAAAATCTTCTATCTCATTTTTATTATCCATAT
TAAAATCATAACTATAGAACATTTTTAAATTTTCTTTAGGTCCAGAGACCACTGGCAA
TTATATATTTTATCAACTTCTCCCCGGAATATATGGACCGCGGTAATTTGGCAGACTT
AGTTTTTCCTCTCATTCTACCTGTAATATCATTCTCATTTTCAGTTTCAAGAATATTTC
TCAATGAAAAATATGCAACCGAAGAAACTCCAATTATATTTCGTAAAAATGCTTCAT
TTTGTCTATTCCTAGCAATAAAATCACTTGTTGCAATCTCTCCAACTTGTAAATAATA
ATTGTATTTCCCACAATTTCTTACATAAGTATCCAATTTATTTAGTAATTTGTTTAGGT
TTAATTTTTTTAAATTTTGATATTCAAATATTCTCTTAATTTAGGAAGTTCTCCG
CTCAGTCTTTTATACACATAATTTTTCAAAAGCTGACTCATTTCAATTTCCACAAAAT
GACAAAAAGCATATTTTATATTTTTATCATTAAGTTCTTCTTTATCCAAATAAGGACTT
ATAAAACACTTGTGATTTTTTTTTAATTCACTCATATCCGGAATTTTTTCAATTAATTCTT
TTATATTATTTACATTTTGTATTTCTTCGTAAAATAGAGGTTAAGTTCTTCCGTAAAATAG
TTTTTTCTTCCAATTATTTTGTGATAGTATTCTCTTATTTGTATTTTTCTCAATAT
GAATTTTCTATTAAAAAAAATAACTTCTCAATATCTTCTTTTAAAAATAACTTC
ATGCTTCCTGTACATTATTTATATAATCATTACGGAATTTTCTATTATCAATATC
ATAAATAATATTTCTTTTGCTCTTCCCTCCAACTTTTTCAACATTATTTTAATAT
TCTGATTAATTAGCCTTATTTTTTTCAAATGAATATTTTAAAGAATTTATCTTATTCAA
TTTTGCCTCAACATCTTTTCTAAATATTTCTAATTCTTCAGAGTTCATTTTCTAAATAT
ACAATATTTTCTTTAAAACTGAAAAACTATTTTTATTTTTTTCAACATCTTTTCTAAA
ATCTTCTTCAGAATAATTTTTATCCTGTACTGCATTTTTCTCTTTCCTATTTTCTCTT
ACAGAACACTATCTTTTAGATGCAATACTTTATTTGAAAAAAACTTTTTAAAAAAA
TCTTCTTATTCTATTTTCTTCTTCACTTGCATTATCAGGATTTTTTATATATATA
GTCTTATACTTAAAAGCTCTGACAATCTCTCACTAGTCCTATTTTCTTCGCTCGTACT
TTTTACTAATTTTCCCTCTTCAATATATTTTTTATGCGAAATATATTTTTTATGC
CTTTCATATATAAAAACCTCCTAATATCTATATTTTTTCCTAATATCTACTAATATC
TCAATGCTTTTTGTAAAATTTGTGAAAAATTCAGATTTTTTTCCTGTGCCAATTT
TAACCAAACAGGAATTGTTAAAGTTTTCTTTTTAAGTGCATTTGTAACTTTTCTTT
TCATACACTGGATCAACAGATAAAATATACAAATACTGATCAGTTTCACAAATACT
TCCTCCACTTTTGAAGGCTCAGGAAATTTTTTTCTTACATCCAAAAAATCAGCCAAAT
GCAGACCCAATGTCTCTCTCAAATTGGAAACAGCCTCCTCCATGCTATCTCCAAATG
TAGCATAATAATTTATCTCTCCATCTTCAAACTTATCAAAATCAACAATACAACCAT
AATAAGTCCCATCTTCCTTAGTTACCACTGCTGGATAAAATACATCCATTTTAATTAT
CTCCAATCTATACCACGTGTTAAATACGTGTTTAAAAATATTTATAAAATTTTTTAGC
ATCTCTGCTAAAATAAAACAATTATTTCAAATTTTTCTATTCCTTAATCACTCATT
TAGTGATTCTTTTTTTACTTGGACAATTTTTCTTCAAATTTTTCTATTCCTTAACTTA
CACATTTTTTTAATATTCCTTATTTAATTGCAAATTTTCATTACTTTTGGGGTGCTCTA
AATCCCATCCAAATTATGGGATAATAATTTTTAGTGAAAGCAAGAAGGGACTAGAA
TTTAATCCCAACTTGTTTTTCAATACTTCTTAATCAAGTTTTTCAATACTTCTTAAT
ATGGTACTGTGACCACACCTTCCACACCTGGGATCATCCATTGATAATGACTACCTC
TTATACGCACAACTTTTCCGCCTAATTTTCTAAATCTTTTTTCGAT (SEQ ID NO: 66)
>G-locus
CTTTCTATCTTTTTCAAATAAAATTAGGCTCTAGTTAGCCTAATCGCATAA
TTATTTATTATAGTATAATTCTTATTTTTTTTCAACCTAAAAATTTTATTCAAA
AAAATTTTCGTTTCAGAACAACCAAGCAACCATATTCAAAAAACAATAAAAAATGA
GCAAGAATTGAAATTTTATTCTCACTCAGAAGTTATTTTTATTAAATATCACTTTTCG
ATATTGGGGTGGTCTATATCAATTTAAAAGACAGAATAGATAATTCTTTAGAGTTTT
AGTCCCCTTCGATATTGGGGTGGTCTATATCAGAAGTCATTTAATAAGGCCACTGTT
AAAAGTTTTAGTCCCCTTCGATATTGGGGTGGTCTATATCCCATCCTAATTTCTTGCT
GATGAGATATTTATTTCTAATTTTTCTATTTTGTCAAACCCCTTCGATATTGGGG
ATTTTTCTCTTTATTAATAATATAGAACCACCCTATATTGGGGTGGTCTAGGATAAT
TTTTCAAAATTCCAATATTTTGTTTTGTGAAATTTTTTCTCCCAATATTGGGGTTTG
CAAGTACCTTCATTTTTTGAAACTGATCTTCTGTCAGGATAATGGAACGGATTGATG
AATTTTCTGGAGCGAGCATTGATAACTGTTTTTCTGCCAGTTCGATTTTTTCTTTTG
TTCGACCTCATTATATATACCGATTTTTGAAGCTGATAATATCCCTTTTCTATCAATT
TTTTCCTAAAAGTCCTATATTCAAATCTCTCAACATCTGTCTGCATAGGAAAATCATA
CATAAGCAGACCAAAATACTCAATACTCATAGTCCATCACGCTCAATGTCGGAATTA
TCACTTCTTCATCTTTTACAAAATAATTTCGTATACTATCCAAATAATAGTCTACCGC
TTGGAAAAAATCATATTTCITATTGTTAAATAATACCTTCTGCTGTGCTACAAGAAGT
ATTTTTTGCCTTATTTCCTTACTTAATTTCACCAAAATACTCAATACTCATAATTTC
AACAAGATAATCCACCATAGGACGAAAAACCTCTATTATATCATCAGAAAAATTAT
AGGCATTAAACTGTGACTTATGATGTAATCCTAAACTTGGATGAAATCCTTTTGCTA
CAATCTTTGATGATATTATAGCTCTTAAAATCATATATCCATAATTAAGTGCAGAATT
CACTCCATCTTCATCAAATCTTTTAAAACTATTACTATACAATTCCTGAAAATATATC
CTTGAAGCTATTGCTTCCTGATGTTCTGCACTCGCATCATCTTTTTTCAAGTTTTCC
ATATGTTTTCAGTCTTTCAATGGAAATATCACTTTTTTCAAGATACTCTAACAATGCT
CTTTGATTTTCAATCTTATTCTCCTATTGCTTCCTGATGTTCTCACTCGCAATACTC
TCCCACTCAATCTGCTCATTTATTCGTAAAGTCACTTGAAAATGATTAAATAATCCCA
GCGAATGAATTTCAGGCTGATGTTTCTCGTTGCAAATAATAATCGGAATGTTATTTTC
CACCAGCCTCAACTGCAAAATCGCACTAATCTTACAATAGCAGTTTTCAATAACTAT
CGCAGATATATCATTCAAAGAAATCTTATTTTTCTCATCATTATTGTCTTCATCAACC
ATTATAAGCTGATTATTCGATATTGACAAATCATCAGCCCTTGTTATGTGAATTATAT
TGGGCATTTTAATCATACTCCTTATAAATTTCATTCTTATAACGTATCATTCGTATTTT
CTATTTTTGTTAAAAGTTCTATTATCAAGTTTTTAATAATCATACTCCTTATACATTCT
TAATTCTAAAACAGAAACTTTTTTAGGTTTCATTAATCTTAAAGTTCTATTATCAAGTT
CCGATAAGTTTAAATTTTTTCTTTAATTCTAAAACAGAAACTTTTAATCTTAAAG
TACTTCAAATACACTTGCATAAGTTGAATTATTATAACGTGTACTATATGATAATAA
ATTAGAAACTCTATCAATTTGTTCTGCAATACTGTAATCAGCAAACGGATTTCTTAC
AATATAGAAATGTGAAATATAGTTTCTAATACTTTCATTTTCCGGCTTATTAATTTCA
GAATTTTCAGACAAATCAATTCCAAATCCATAACATATTCTAATACTTTCATATTTTCC
ATTCTTCATCAAAAAATTTATAGTATGCTGTTGTTGTATAAAAGCCATCAGATCCATT
ACGCTTAGGATAAGCTCTACTTATTCCAGTATTGTAGCCACTTAACTTAATAATTCCT
AATTCTCTTAGCCCATTTACAATATAGTGCATATCTCTTTCAAATCTAGCCATTTGAA
TAGCAAGTTTCCAATTTATATCTATCAAATAACTTTCTATTTTATTCAAATAATTAAA
TTCTACCAAATCTCTAATTTTTTTGTATTCAGAAACGTTTCCAATTTATATCTATCAA
ATTTATAGTTTTTATTTTGTATATTTTTTGCAAAAAAGTCATCATTTTCTAATTTTT
TTTATATACTTCTCTTTGTATTCTTTAGAATATCCATTTAGTTTATCATTTAGATTT
CAATATTGCATCAATTTCAGATATTTTATTTTTTCTAATATTTTTTGTTTTTGTATT
ATAAAAATTTTGCATCAGCCATTTTAATATCATTTGAAATTAATCCAGAAACGCATC
AAAATTTGGATTTCCAATATTTAAAAATAAATTCTTTTAGCCATTTTAAATAAATT
TTACGTTCTTTAGGATAATATATTTCTTGAAATTTATTTTCATTCTATCTCTTTTAGC
TTCTATTAAATTATCTATTTCTTTTTTGTATTTTTTTATTCAGAAATTTGAAATTA
TTCTACACAATATTTTACTCTTTATTTCCTGATCTTTATATTCTGCCTAATAATGCCT
TTTTTTTTCAAATCCTTTTTATTTATGTTTGATAACTTTCTTTGTTCAATCTTTATATT
TTCGATTTTTTATCTATCTCAAATTTAGTTTCATCATCAAAAATTACAATATATTAATA
TTTTTTCTCTAAAACATCACAACCTTCTACACAATATTTTACTTAAAAATTTCTAGTT
TTTTTTATATCCTCATAATAATTATTAAAAATTTCTTTTTTAGTTTGTATTAGTTT
ATCAAAGTCTTTTTCTATCTCTTTCATTTTTTGAATAAATTCTTCTAAATAGATA
AATTTTCAGTTATACATTCATTTCTCAAAGTATTTAATTGCATTATTTCATCTAAAAT
ATCTATAATATTTTGATATTCTGAAGTATTTAACCAAACTGATGTTGCAAAAAATCT
ATTTCTAATTTTATTTATAACCGCATTACTATTTAACAGTGCAAATATTGAAATTATA
TATTCAAAATCATCATTTATTACTATAGTTTTATCCATTTATTACTATAGTTCTATA
GTAAGTTTTATTATCATTAATGTCTTTTATTTGTTTCTTAACTATAGTTTTATCCATTT
TAAAATCTGAAAAATCAAAAAGTTCCTCATAATTTTTTCTCAAATATCCAATATAAC
ATTCTATTACTTTTTTCTGATATTTTTTAATAGCTTTATTATCTGATATTTTTTAATAG
ATCTGAGCATTTTTATAATAATTTTCTATAATATTTTCATCTATTCATAATTTTTT
TAAAGTTTTCTTTAATTCTTGTAAAAATATATTCTTACTTTCATTTTCTTCAATATATT
CTTCTAAAATTAATTTCTTATACAATTCTTTATTCACATATATTAAAGCATTTAATAC
TATTTTTTCTGTTTCTATAGTATCAAATGGTTCCTTAGCATTTTTATAATAATTATTAAA
TTAATATTTCAGGAAGTACTTTAGAAAAGGATTGGTAAATATTTAATATCATTATTAT
TTTCTTCTGAAATTTTAATATCATTTATTTTAGTAATTATATTTTCTATAGTATCAAAT
ACTACATCTAAATTTAATGCTTTTGACACTTCTTCATCTGATATTTTGGTTTAGAAAAG
TATATTTATGACTTTATTATAGTCATCTTGCGTTCCTTGTAAATCTCTTTGGATTGGTA
TCGCATGTAATATCCTGTTTCTTTCATTTAAACTACATCTAAATTTATATGACTTTATTA
TTATTTGTAATGTTATTTTTATTATCTATAAAATCTAAGTCTCTTTATTATAGTCATCTT
GAATTTAAAATTTTTTTATCAAGTACGTAATTTTTTTTTAATATTTCAGGAAGTACTAAA
CTATATTTTCATCAATATTTTCTCTATCATTTAAAATTTTTTTATCAAGTTTATTTTTTA
GTAGAAGCAAAAAAAGTAATCAATTCTAAATCCAATTCCTCTTTAGCGTGAAGTCTATT
GAAAAATCATCAGTATTTACTGTTGTCATATCTATATCATTATGTCTTAATTTCCCTAGT
AATACATAATATGCTCTAACGTATATTGCTTATTTTTCCATATCTTTAGAGCGTGATGT
TATACTTTCATTTAAAATTTTTTCAAATTTTTTTATCAAGTACGACTCTTTTTAAAAT
TTGTTCATTTACCAATATTTTTTCAATTCTTCATCAAGTACGTAATTTTTATAATATGCT
ATAGTTCTTTTTCTTCATCAGATTTCTTTGAAAATTTTTTCGAATCAACTAACATATTT
TAATGTTTTTTAAATATTCCAAAAATTTCTGTCTATTTTATATTATCATTTAAAATTTTT
TTCTAATTTTTTTATTAATTCATCTATTTTAAATTCTGATCAGATTTCTTTGAATCTAT
TTTTATACTATTATTTTTTATATTTTCTACAAAAAATTTTCTGTCTATTTTATATTTCTG
TTCTCTTTCTATTTTAAATTTTTCGTGCTTATCTAATAGTACATAAGAACAAAAAATTTTC
TTCTATTTCTTCTCTTTTCAAGAAATTCATTATTAACTTTTTTTTGTTTCTACAAAAAATTT
TAGTAATATTCCAAAATTCTAACTTCTTTTATAACAAAATCAGCTATATCTTCTACTGT
TAAATCTACATTTATATTTAAAATTTTTTCAACAAGCATTTTTTTATTTTTAGATTTCT
TTTTATCACCACCAACATTAAGATAAAATTTTACAAAACCCAGAATTTCTAAATTAC
TTTTTATTTTTTCTCTTATTTCCATTTTTATTTTTAGAAAATTTTACAAAACCCAG
TTCAATAATTTTTCTCTTAAATGTTCTTCATAATATCGATTTTCAAATACTCTTCATAA
TTCATTTTCAATTATTTTTTCTATAATCTTATATAAACTCATGTAATGTTCTTCATAA
TTTCGTAAATTGATTTTTTTGTTTCTAATTCATCATTTTCTATTATCTCATGTAATGT
AACAATCATTTAGTGTTTTATTAGTATACTCATCTCTGATATCTATCTCTATTTCTTCT
TCATTCTCTTGTCTCTTTATTTCTATTTTTTTATCATCTTTAGTTATATACTCATCTCTG
GCTTCATCTATTATTTTCTTTTTTGTAATCCCCAATGCATAATACAACTTCCCCAATG
ATATGCTTCTATATATAATACAACTTCTTCTGTTTCCAAAAAATCTGTAATCCCCAATGCA
ATTCTTATGATTCCTTCTTTACCTTTCAACTTAAATAGAATATTTCCTGCATGAAATTT
TCTTGTAAATTCTTTAAGAATATTATCATTTTTTTTGTATTATGATTCCTTCTTTACC
ATTTATTATTATCAATTTTTTCTTTATTATTATTATTTTTTTTGTATTATGATTCCTT
TTTCCATCATAGTTCCTTTTAACTTTACTTTCCGTTTTTTATTATTATTATTTTTTTT
CGAACTTCATACCATCTCTTATGTCCAAATAAATTTCCCATTCCAATCTCCTCGTTTC
TACTTTAATCTAATAAAATATTTTTAAATTAAATCAATTTACATCTTTCTAATCAAA
AATACAATTTTCCATTTTTAGTATACCACATATCTCAAAAAAATAAGGAAATAAGAAAA
AGCCGTCAAACATAGCTCCCTACTTCTATTTACTCATAATCCCCATCTATCCTTACTT
TTCGTAAAATCAATCCTTCTTTCGCCTTTAGATCCAACTTAATTTTCCCATCAATATTAA
TGTTCTAAATGTTCTGCCTTCTGTTACCAAATCAATAAATCTTTCATCCTGATAATTT
GTTTCAAATTCCACATTTTCCCAGCTGTTAAACGAATTATTTATTACAACAATAATTA
AATGATCCTCGATTACTCTTTCATACACAATTATTT (SEQ ID NO: 67)

### Example 3

### Further Evaluation of C2c2p and Associated Components

[0996] Applicants isolated both C2c2 loci from Carnobacterium gallinarum (FIG. 46) and have studied domain structure and organization as well as expression of the CRISPR array. At the first C2c2 locus, there is low expression of the two CRISPR arrays in the direction of the C2c2 gene. (See FIG. 47). The second locus also has low expression with direction of transcription in the direction of the C2c2 gene. (See FIG. 48). Applicants determined that both loci may have minimal expression since neither locus has associated Cas genes (Cas1/Cas2). Such associated genes may be needed for a functional CRISPR locus. Applicants have optimized methods to obtain C2c2 loci from other bacterial strains,

[0997] Applicants perform RNA-sequencing on the following strains that are grown: Clostridium aminophilum DSM10710, Carnohacierium gallinarum DSM4847, Leptotrichia wade F0279, Leptotrichia shahii DSM19757, and Rhodobacter capsulatus SB1003.

[0998] Applicants design pACYC cloning from the following sources of DNA. Applicants clone the entire C2c2 locus into this backbone for DNA/RNA cutting experiments in E. coli.
[0999] 1) Isolated genomic bacterial DNA: Lachnospiraceae bacterium MA2020, Lachnospiraceae bacterium NK4A179, Lachnospiraceae bacterium NK4A144
[1000] 2) From growing the strain: Clostridium aminophilum DSM10710, Carnobacterium gallinarum DSM4847, Leptotrichia wade F0279, Leptotrichia shahii DSM19757, Rhodobacter capsulatus SB1003

[1001] Applicants design PAM bait libraries for DNA cutting to evaluate the cutting ability of the C2c2p effector protein. Applicants design RNA cutting experiments based on the cutting of a resistance gene transcript.

[1002] Applicants test for function in mammalian cells using U6 PCR products: spacer (DR-spacer-DR) (in certain aspects spacers may be referred to as crRNA. or guide RNA or an analogous term as described in this application) and tracr for following strains: Lachnospiraceae bacterium, Listeria seeligeri serovar 12b, Leptotrichia wadei, Leptotrichia shahii. Applicants mammalian codon optimized the DNA encoding the C2c2 protein and cloned it into a plasmid from Genscript.

[1003] Applicants analyzed a representative C2c2 locus, i.e., the Listeria seeligeri serovar 1/2b str. SLCC3954 C2c2 (LseC2c2) CRIPSR locus. Applicants performed RNA-sequencing on the L. seeligeri C2c2 locus which was cloned into E. coli. The LseC2c2 locus was synthesized by Genscript into a pET-28 vector. Cells harboring plasmids were made competent using the Z-competent kit (Zymo). E. coli containing heterologous constructs were cultured in Luria broth supplemented with appropriate antibiotics in suspension at 37° C. and 300 rpm. The bacteria were grown in aerobic conditions and harvested in stationary growth phase.

[1004] RNA was isolated from stationary phase bacteria by first resuspending the bacteria in TRIzol and then homogenizing the bacteria with zirconia/silica beads (BioSpec Products) in a BeadBeater (BioSpec Products) for 7 one-minute cycles. Total RNA was purified from homogenized samples with the Direct-Zol RNA miniprep protocol (Zymo), DNase treated with TURBO DNase (Life Technologies) and 3′ dephosphorylated with T4 Polynucleotide Kinase (New England Biolabs). rRNA was removed with the bacterial Ribo-Zero rRNA removal kit (fflutnina.). RNA sequencing libraries were prepared from rRNA-depleted RNA using a derivative of the previously described CRISPR RNA sequencing method (Heidrich et al., 2015, Methods Mol Biol, vol. 1311, 1-21). Briefly, transcripts were poly-A tailed with E. coli Poly(A) Polymerase (New England Biola.bs), ligated with 5′ RNA adapters using T4 RNA Ligase 1 (ssRNA Ligase), High Concentration (New England Biolabs), and reverse transcribed with AffinityScript Multiple Temperature Reverse Transcriptase (Agilent Technologies). cDNA was PCR amplified with barcoded primers using Herculase II polymerase (Agilent Technologies).

[1005] The prepared cDNA libraries were sequenced on an MiSeq (Illumina). Reads from each sample were identified on the basis of their associated barcode and aligned to the appropriate RefSeq reference genome using BWA (Li and Durbin, 2009, Bioinformatics, vol. 25, 1754-1760), Paired-end alignments were used to extract entire transcript sequences using Picard tools (broadinstitute.github.io/picard) and these sequences were analyzed using Geneious 8.1.5.

[1006] The Applicants observed a high level of expression of the locus and the formation of small crRNAs with a 5′ 29-nt DR and 15-18-nt spacers (FIG. 49A). Although the LseC2c2 locus contains a predicted putative tracrRNA (FIG. 15), the Applicants did not observe its expression (FIG. 49A). These findings suggest that the secondary structure present in the pre-crRNA of the LseC2c2 locus could be sufficient for processing yielding the mature crRNA as well as crRNA loading onto the C2c2 protein. The RNA-folding of the processed crRNA shows a strongly predicted stem loop within the direct repeat that potentially could serve as a handle for the C2c2 protein (FIG. 49A).

[1007] The Applicants also expressed the Leptotrichia shahii str. SLCC3954 C2c2 locus in E. coli and analyzed its expression using Northern blotting. The procedure was performed essentially as described in Pougach and Severinov, 2012 (Methods Mol Biol, vol. 905, 73-86). E. coli BL21 AI cells were transformed with the plasmid pACYCduet-1 containing under inducible T7 promoter Leptotrichia shahii cas operon and plasmid pCDF-1b containing the minimal CRISPR cassette with a single spacer. Total RNA was extracted from 5 mL of E. coli cells induced with 1 mM arabinose/0.2 mM IPTG and grown until OD₆₀₀ 0.8-1.0. The cells were lysed by 5-minute treatment using Max Bacterial Enhancement Reagent followed by RNA purification with the TRIzol reagent (Thermo Fisher Scientific). 15 μg of total RNA were separated on a denaturing 8 M urea—12% polyacrylamide gel and electrophoretically transferred to Hybond-XL membrane (GE Healthcare) using a Mini Trans-Blot Electrophoretic Transfer Cell (Bio-Rad). The membrane was dried and then UV cross-linked, ExpHyb hybridization solution (Clontech) was used for hybridization according to manufacturer's instructions for 1 hour at 40° C. with ³²P-end labeled oligonucleotide probes. The Applicants found that the CRISPR array is expressed and processed into 44-nt crRNAs (FIG. 49B). The expression and crRNA formation was thus demonstrated herein in at least two distinct C2c2 loci using independent methods.

[1008] The Applicants sought to predict potential tracrRNAs for the rest of the identified C2c2 loci by searching for anti-repeat sequences within each locus. In many CRISPR-Cas loci, the repeat located at the promoter-distal end of the CRISPR array is degenerate and has a sequence that is clearly different from the rest of repeats (Biswas et al., 2014, Bioinformatics, vol. 30, 1805-1813). Such degenerate repeats were detected in several C2c2 and C2c1 systems , allowing the Applicants to predict the direction of the array transcription. By integrating this information, putative tracrRNAs for 4 of the 17 C2c2 loci and 4 of the 13 C2c1 loci were identified. In some subtype II-B and II-C loci, the CRISPR array is transcribed in the opposite direction, starting from the degenerate repeat (Sampson et al., 2013, Nature, vol. 497, 254-257; Zhang et al., 2013, Mol Cell, vol. 50, 488-503). Accordingly, we attempted to predict the tracrRNA in different positions with respect to the CRISPR array but were unable to identify additional candidate tra.crRNA. sequences. Conceivably, the prediction of tracrRNA for other loci was hampered by a combination of factors such as imperfect complementarity to repeats, lack of an associated CRISPR array, and/or potential incompleteness of the loci. Furthermore, the possibility remains that not all Class 2 CRISPR systems require tracrRNA.

[1009] The Applicants identified depleted sequence motifs in order to identify PAM nucleotides. A PAM library was prepared in a bacterial vector and transformed into a strain of E. coli expressing LshC2c2 (FIG. 54). in further detail, the assay is as follows for a RNA target, provided that a PAM sequence is required to direct recognition. Two E.coli strains are used in this assay. One carries a plasmid that encodes the endogenous effector protein locus from the bacterial strain. The other strain carries an empty plasmid (e.g. pACYC184, control strain). All possible 7 or 8 bp PAM sequences are presented on an antibiotic resistance plasmid (pUC19 with ampicillin resistance gene). The PAM is located next to the sequence of proto-spacer 1 (the RNA target to the first spacer in the endogenous effector protein locus). Two PAM libraries were cloned. One has a 8 random by 5′ of the proto-spacer (e.g. total of 65536 different PAM sequences=complexity). The other library has 7 random bp 3′ of the proto-spacer (e.g. total complexity is 16384 different PAMs). Both libraries were cloned to have in average 500 plasmids per possible PAM. Test strain and control strain were transformed with 5′PAM and 3′PAM library in separate transformations and transformed cells were plated separately on ampicillin plates. Recognition and subsequent cutting/interference with the plasmid renders a cell vulnerable to ampicillin and prevents growth. Approximately 12 h after transformation, all colonies formed by the test and control strains where harvested and plasmid RNA was isolated. Plasmid RNA was used as template for PCR amplification and subsequent deep sequencing. Representation of all PAMs in the untransfomed libraries showed the expected representation of PAMs in transformed cells. Representation of all PAMs found in control strains showed the actual representation. Representation of all PAMs in test strain showed which PAMs are not recognized by the enzyme and comparison to the control strain allows extracting the sequence of the depleted PAM. CRISPR interference results in ineffective transformation by plasmids containing an effective target sequence. Transformant plasmids were sequenced to identify non-target sequences. Depleted sequences identify the 5′ PAM nucleotides (FIG. 55). Heterologous targeting in E. coli was observed for three targets. Increased interference was observed for more highly transcribed targets. In particular, a target in a transcribed region (“RNA)” coincided with increased interference compared to minimally transcribed target “DNA1” and “DNA2” (FIG. 56). A 5′ DNA PAM screen showed no DNA cleavage (FIG. 85). LshC2c2 does not cleave untranscribed or transcribed DNA in an E. coli RNAP in-vitro assay (FIG. 83). LshC2c2 does not cleave ssDNAor dsDNA in vitro (FIG. 84).

[1010] LshC2c2 components were purified for in vitro tests (FIG. 57). Initially, it was observed in test reactions that crRNA is cleaved by C2c2. Cleavage of crRNA is not Mg²⁺ dependent, and may be elevated in the absence of target (FIG. 58). It was further found that there is reduced cleavage in absence of Mg (FIG. 108)

[1011] After showing the capability of the LshC2c2 CR1SPR locus to mediate ssRNA interference, we wanted to demonstrate two additional aspects of C2c2 activity: 1) RNA interference using an orthogonal assay, and 2) the ability to retarget C2c2 to endogenously expressed transcripts in a cell. We developed a fluorescent readout for LshC2c2 activity by expressing RFP from a transfected plasmid in E. coli (FIG. 63A). We then designed three spacers for each of the three possible H PAMs (9 spacers total) targeting the RFP mRNA and cloned them into the pLshC2c2 backbone as before. We transfected these plasmids into E coli already expressing the REP plasmid and grew them under double selection over night. By analyzing the RFP levels in E. coli by flow cytometry, we observed robust RFP knockdown for all three PAMs and no REP knockdown for spacers targeting the anti-sense DNA strand or non-targeting spacers (FIG. 63B-C).To further investigate LshC2c2 targeting and cleavge activity, spacers targeting RFP were cloned into the LshC2c2 locus and the locus was expressed in E. coli carrying a plasmid encoding expressible RFP or a pUC19 control plasmid. FIG. 61 shows C2c2 targeted the transcribed RFP, Strand-dependency of interference was investigated by selecting target sequences coinciding with or complementary to transcribed regions. High levels of interference were observed using targeting sequences complementary to transcribed RNA (FIG. 62). The extent of interference was also observed to vary among transcribed targets, possibly in relation to transcription levels (FIG. 63).

[1012] RNA targeting and target selection was investigated using a model transcript and testing different targets (FIG. 65). Cleavge of RNA was tested using RNA targets (FIGS. 66 and 67) and RNA transcribed from DNA templates (FIGS 68 and 69). Observed RNA cleavage products coincided in size with those expected from the model transcript (FIG. 70). FIG. 87 demonstrates that LshC2c2 does not require the small RNA for RNA cleavage.

### Example 4

### C2C2 Targets and Cuts RNA In Vitro

[1013] Leptrichia shahii C2c2 is Capable of Interference Against ssRNA MS2 Phage

[1014] C2c2 was first discovered in a computational search of conserved unknown proteins near the adaptation protein Cas2 in order to uncover novel Class 2 CRISPR systems (Shmakov et al) and is hypothesized to be the functional effector of a novel CRISPR sub-type VI group because of little homology to other known CRISPR proteins. The C2c2 proteins has two conserved HEPN domains that show strong conservation of the active residues but little homology to any other known HEPN superfamily proteins or CRISPR effectors. However, C2c2 differs from other HEPN proteins, particularly CRISPR-associated type III proteins Csx1 and Csm6, which typically dimerize prior to cleavage of RNA, because it has two HEPN domains rather than one. Many of these unique features have prompted the classification of C2c2 as a putative type VI. Given these observations and the prevalence of C2c2-family proteins across diverse bacterial species, we sought to determine whether C2c2 CRISPR-Cas loci are biologically active and can mediate interference against RNA.

[1015] To determine whether the Leptotrichia shahii C2c2 (LshC2c2) is a functional RNA-targeting system, we cloned the entire LshC2c2 CRISPR-Cas locus into low-copy plasmids (pLshC2c2) to allow heterologous reconstitution in E. coli. With currently characterized DNA- and RNA-targeting CRISPR systems, target cleavage is dependent on two factors: 1) complementarily between the crRNA spacer sequence and target site (protospacer) and 2) the presence of the appropriate proximal adjacent motif (PAM) flanking the protospacer. Because the PAM requirement is meant to discfiminate self vs. non-self recognition, it is unclear whether a uniquely RNA-targeting system would require a PAM since presumably there would be no self-RNA to even target.

[1016] To investigate the PAM requirements and activity of LshC2c2, we used the MS2 phage restriction assay (FIG. 73). MS2 phage is an ideal model to investigate RNA cleavage because it is a lytic single-stranded RNA phage that has no DNA intermediates during its life cycle. It readily infects E. coli via attachment to the F pilus and can thus be used for testing heterologous interference against ssRNA. We synthesized a library of crRNA sequences to tile every possible 28nt target site in the MS2 phage genome in order to identify which target sites were more significantly depleted than others. The crRNA library was cloned into pLshC2c2 such that each unique spacer was the first spacer of a two-spacer array. We transformed this library into E. coli NovaBlue (DE3, F+) and grew the cultures with or without MS2 phage overnight. Using this assay, we were able to identify a single-nucleotide PAM by analyzing the flanking regions of the crRNA target sequences that were enriched due to resistance against MS2 infection. The analysis revealed a 3′ H PAM (not G) on the RNA target indicative that there is some sequence preference by the LshC2c2 complex (FIG. 75A-B). Beyond the identification of a PAM, the screen revealed that the heterologously expressed LshC2c2 locus was capable of significant ssRNA interference and protection against MS2 phage infection.

[1017] To validate the screen findings, we cloned four of the top enriched spacers and showed 3- to 4-log reduction in plaquing efficiency consistent with the level of enrichment observed in the screen. Moreover, we wanted to further validate the PAM finding and so we cloned a series of four guides per possible single nucleotide PAM (16 guides in total) all targeting a region of the MS2 mat gene. We found that all 16 targets were efficiently targeted with a stronger preference for C, A, and U. Because G PAMs are still targeted and there were a minority enriched in the interference screen, the PAM may be more relaxed than a 3′ H PAM.

[1018] The C2C2 protein from leptotrichia shahii was expressed in E. coli and purified using His-tag affinity purification followed by three rounds of gel filtration on an Akta FPLC using a Superdex 200 column. For in vitro cleavage experiments, a 175 nucleotide RNA target (labeled t1 and t3 respectively, see below for sequences) was combined with a 5× molar excess of C2c2 protein and crRNA (using a 28 nucleotide spacer and a 28 nucleotide direct repeat, see below for sequence) and incubated at 37 C for 15 minutes in the buffers indicated in the figure panels. The reaction was quenched with proteinase K incubation for 15 min at 37 C and subsequently denatured in TBE-Urea loading buffer at 85 C for 5 min. Samples were resolved on a denaturing TBE Urea PAGE gel.

[1019] The results indicate that C2C2 mediates efficient degradation of the RNA target in a crRNA-dependent manner. (FIG. 71, FIG. 79, FIG. 80) Notably, the crRNA itself is also cleaved during this process.

[1020] Targeting of RFT transcripts in bacteria showed that growth rate is reduced (FIG. 77). Without wishing to be bound by theory, this may suggest that the HEPN system is a suicidal phage defense system.

[1021] Cleavage fragments were mapped as indicated in FIGS. 81 and 114.

[1022] RNA-sequencing of IVC (in vitro cleavage) was performed as indicated in FIG. 82.

[1023] RNA target 1 Sequence

(SEQ ID NO: 68)
aatatggattacttggtagaacagcaatctaCGCCAGAAATTCGAGCTCG
GTACCCGGGGATCCTCTAGAGTCGACCTGCAGGCATGCAAGCTTGGCGTA
ATCATGGTCATAGCTGTTTCCTGTGTttatccgctcacaattccacacaa
catacgagccggaagcataaag

[1024] RNA target 3 Sequence

(SEQ ID NO: 69)
GGCCAGTGAATTCGAGCTCGGTACCCGGGGATCCTCTAGAaatatggatt
acttggtagaacagcaatctaCTCGACCTGCAGGCATGCAAGCTTGGCGT
AATCATGGTCATAGCTGTTTCCTGTGTttatccgctcacaattccacaca
acatacgagccggaagcataaag

[1025] crRNA Sequence

(SEQ ID NO: 70)
CCACCCCAATATCGAAGGGGACTAAAACtagattgagttcaccaagtaa
tccat

[1026] L. shahii C2c2protein Sequence

(SEQ ID NO: 71)
MGNLFGHKRWYEVRDKKDFIKRKVKVKRNYDGNKYILNIENNNKEKID
NNKFIRKYINYKKNDNILKEFTRKFHAGNILFKLKGKEGIIRIENNDDFL
ETEEVVLYIEAYGKSEKLKALGITKKIIDEAIRQGITKDDKKIEIKRQEN
EEEIEIDIRDEYTNKTLNDCSIILRIIENDELETKKSIYEIFKNINMSLY
KIIEKIIENETEKVFENRYYEEHLREKLLKDDKIDVILTNFMEIREKIKS
NLEILGFVKFYLNVGGDKKKSKNKKMLVEKILNINVDLTVEDIADFVIKE
LEFWNITKRIEKVKKVNNEFLEKRRNRTYIKSYVLLDKHEKFKIERENKK
DVIVKFFVENIKNNSIKEKIEKILAEFKIDELIKKLEKELKKGNCDTEIF
GIFKKHYKVNFDSKKFSKKSDEEKELYKIIYRYLKGRIEKILVNEQKVRL
KKMEKIEIEKILNESILSEKILKRVKQYTLEHIMYLGKLRHNDIDMTTVN
TDDFSRLHAKEELDLELITFFASTNMELNKIFSRENINNDENIDFFGGDR
EKNYYLDKKILNSKIKIIRDLDFIDNKNNITNNFIRKFTKIGTNERNRIL
HAISKERDLQGTQDDYNKVINIIQNLKISDEEVSKALNLDVVFKDKKNII
TKINDIKISEENNNKIKYLPSFSKVLPEILNLYRNNPKNEPFDTIETEKI
VLNALIYVNKELYKKLILEDDLEENESKNIFLQELKKTLGNIDEIDENII
ENYYKNAQISASKGNNKAIKKYQKKVIECYIGYLRKNYEELFDFSDFKMN
IQEIKKQIKDINDNKTYERITVKTSDKTIVINDDFEYIISIFALLNSNAV
INKIRNRFFATSVWLNTSEYQNIIDILDEIMQLNTLRNECITENWNLNLE
EFIQKMKEIEKDFDDFKIQTKKEIFNNYYEDIKNNILTEFKDDINGCDVL
EKKLEKIVIFDDETKFEIDKKSNKILQDEQRKLSNINKKDLKKKVDQYIK
DKDQEIKSKILCRIIFNSDFLKKYKKEIDNLIEDMESENENKFQEIYYPK
ERKNELYIYKKNLFLNIGNPNFDKIYGLISNDIKMADAKFLFNIDGKNIR
KNKISEIDAILKNLNKDLNGYSKEYKEKYIKKLKENDDFFAKNIQNKNYK
SFEKDYNRVWEYKKIRDLVEFNYLNKIESYLIDINWDKAIQMARFERDMH
YIVNGLRELGIIKLSGYNTGISRAYPKRNGSDGFYTTTAYYKFFDEESYK
KFEKICYGFGIDLSENSEINKPENESIRNYISHFYIVVNPFADYSIAEQI
DRVSNLLSYSTRYNNSTYASVFEVFKKDVNLKYDELKKKFKLIGNNDILE
RLMKPKKVSVLELESYNSDYIKNLIIELLTKIENTNDTLKRPAATKKAGQ
AKKKKGSYPYDVPDYAYPYDVPDYAYPYDVPDYA

[1027] RNA PAM screen using MS2 phage interference identified PAMs, see FIGS. 73-78. It was determined that LshC2c2 has a 3′ PAM for RNA cleavage (FIG. 86). FIGS. 88 and 89 also demonstrate that LshC2c2 is reprogrammable and PAM sensitive.

[1028] FIG. 90 demonstrates that LshC2c2 cannot use spacers less than 18-22nt.

[1029] FIGS. 91-93 show the influence of stem loop (modifications) on cleavage. It is shown that crRNAs without stern loop do not allow for cleavage (FIG. 91) and that Stern is amenable to individual base swaps but activity is disrupted by secondary structure changes. DR Truncation experiments also indicate that disruption of the stem abolishes cleavage (FIG. 92 and FIG. 93).

[1030] FIG. 100 shows the effects of divalent cations on C2c2 activity.

[1031] It was shows that C2c2 cuts 3′ of the target site (FIG. 102 and FIG. 103)

[1032] FIGS. 104-106 show that C2c2 can be reprogrammed with crRNAs.

[1033] Without wishing to be bound by theory, it seems that one active, C2c2 becomes active and degrades other RNAs (FIG. 98; FIG. 108).

[1034] It was shown that C2c2 may be reprogrammed with crRNAs (FIGS. 104-106), and that long targets may be targeted (FIG. 107)

[1035] FIG. 112 suggests that C2c2 crRNAs have a seed region, as indicated by single and double mismatch analysis. Indeed, double mismatch in nt 1-11 of target significantly affects cleavage while less so if in region region spanning nt 16-26. These figures also demonstrate specificity of cleavage of C2c2 effector protein.

[1036] FIG. 113 and FIG. 114. Suggest that changing sequence contexts affects cleavage patterns. indeed target sequences provided in different context are cleaved differently.

### Example 5

### Mutation of Either HEPN Domain Abolishes Tageted Cleavage

[1037] Cpc2 variants were created comprising the mutations R597A and R1278A. As shown in FIG. 72, both mutations abolished RNA cleavage, see also FIG. 97, demonstrating that R597A, H602A, R1278A, and H1283A abolish RNA cleavage

[1038] HEPN mutants however still process natural array (FIG. 95).

[1039] HEPN mutants still retain targeted binding activity, as demonstrated by FIG. 111 (SMSA analysis). Top panel: binding of wild type C2c2. Bottom panel: binding of R1278A mutated Lsh C2c2.

### Example 6

[1040] Corresponding residues in other C2c2 orthologs were identified by structural alignment to identify structural representatives that correspond to either their experimentally determined structures or homology models. FIG. 109 illustrates the sequences alignment of the following orthologs of the Leptotrichia shahii DSM 19757 C2c2; Rhodobacter capsulatus SB 1003 (RcS); Rhodohacier capsulatus 8121 (RcR); Rhodobacter capsulatus DE442 (RcD); Lachnospiraceae bacterium MA2020 (Lb(X)); Lachnospiraceae bacterium NK4A179 (Lb(X); [Clostridium] aminophilum DSM 10710 (CaC); Lachnospiraceae bacterium NK4A144 (Lb(X); Leptotrichia wadei F0279 (Lew); Leptotrichia wadei F0279 (Lew); Carnobacterium gallinarum DSM 4847 (Cg); Carnobacterium gallinarum DSM 4847 (Cg); Paludibacter propionicigenes WB4 (Pp); Listeria seeligeri serovar 1/2b (Ls); Listeria weihenstephanensis FSL R9-0317 (Liw); and Listeria bacterium FSL M6-0635 (Lib). FIG. 110 demonstrates that C2c2 orthologues have conserved HEPN domains.

[1041] Using the numbering from a consensus sequence obtained using MUSCLE alignment (www.ebi.ac.uk/Tools/msa/muscle/), the following conserved residues were identified. K36, K39, V40, E479, L514, V518, N524, G534, K535, E580, L597, V602, D630, F676, L709, I713, R717 (HEPN), N718, H722 (HEPN), E773, P823, V828, I879, Y880, F884, Y997, L1001, F1009, L1013, Y1093, L1099, L1111, Y1114, L1203, D1222, Y1244, L1250, L1253, K1261, I1334, L1355, L1359, R1362, Y1366, E1371, R1372 D1373, R1509 (HEPN), H1514 (HEPN), Y1543, D1544, K1546, K1548, V1551, I1558. The pairwise match up of conserved residues in the consensus sequence with amino acids of Leptotrichia wadei C2c2 (sequence F herein) is: K36,K2; K39,K5; V40,V6; E479,E301; L514,L331; V518, I1335; N524,N341; G534, G351; K535, K352; E580,E375; L597, L392; V602,L396; D630,D403; F676, F446; L709, I466; I713, I470; R717 (HEPN), R474; N718, H475; H722 (HEPN), H479, E773, E508; P823, P556; V828, I561; I879, I595, Y880, Y596; F884, F600; Y997, Y669; L1001, I673; F1009, F681; L1013, L685; Y1093, Y761; L1099,L676; L1111, L779; Y1114,Y782; L1203, L836; D1222, D847; Y1244, Y863; L1250, L869; L1253, I872; K1261, K879; I1334; I933; L1355, L954; L1359, I958; R1362, R961; Y1366, Y965; E1371, E970; R1372, R971; D1373, D972; R1509 (HEPN), R1046; H1514 (HEPN),H1051; Y1543, Y1075; D1544, D1076; K1546, K1078, K1548, K1080; V1551, I1083; I1558, I1090.

### Example 7

### Generation of C2c2 Mutants with Enhanced Specificity

[1042] Recently a method was described for the generation of Cas9 orthologs with enhanced specificity (Slaymaker et al. 2015). This strategy can be used to enhance the specificity of C2c2 orthologs. Primay residues for mutagenesis are all positive charges residues within the HEPN domain, since this is the only known structure in the absence of a crystal and we know that specificity mutants in RuvC worked in Cas9. The conserved Arginine residues within HEPN domain are R717 and R1509.

[1043] Additional candidates are positive charged residues that are conserved between different orthologs such as K2, K39, K535, K1261, R1362, R1372, K1546 and K1548.

[1044] These can be used to generate C2c2 mutants with enhanced specificity.

### Example 8

### C2c2 is a Single-Component Programmable RNA-Guided RNA-Targeting CRISPR Effector

TABLE A
crRNA sequences used for in vitro experiments.

| | | | SEQ |
|---|---|---|---|
| | | 1st | ID |
| Name | Sequence | FIG. | NO: |
| crRNA 14 | CCACCCCAAUAUCGAAGGGGACUAAAACUAGAUUGCUGUUCUACCAA | 117B | 72 |
| | GUAAUCCAU | | |
| crRNA 15 | CCACCCCAAUAUCGAAGGGGACUAAAACUUUCUAGAGGAUCCCCGGG | 117D | 73 |
| | UACCGAGCU | | |
| crRNA 16 | CCACCCCAAUAUCGAAGGGGACUAAAACAGUAAUCCAUAUUUCUAGA | 117D | 74 |
| | GGAUCCCCG | | |
| crRNA 17 | CCACCCCAAUAUCGAAGGGGACUAAAACUAGAUUGCUGUUCUACCAA | 117D | 75 |
| | GUAAUCCAU | | |
| crRNA 18 | CCACCCCAAUAUCGAAGGGGACUAAAACCAUGCCUGCAGGUCGAGUA | 117D | 76 |
| | GAUUGCUGU | | |
| crRNA 19 | CCACCCCAAUAUCGAAGGGGACUAAAACGCAUGCCUGCAGGUCGAGU | 117D | 77 |
| | AGAUUGCUG | | |
| crRNA 20 | CCACCCCAAUAUCGAAGGGGACUAAAACAAGCUUGCAUGCCUGCAGG | 117D | 78 |
| | UCGAGUAGA | | |
| crRNA 21 | CCACCCCAAUAUCGAAGGGGACUAAAACCGCCAAGCUUGCAUGCCUG | 117D | 79 |
| | CAGGUCGAG | | |
| crRNA 22 | CCACCCCAAUAUCGAAGGGGACUAAAACGAUUACGCCAAGCUUGCAU | 117D | 80 |
| | GCCUGCAGG | | |
| crRNA 23 | CCACCCCAAUAUCGAAGGGGACUAAAACUGAUUACGCCAAGCUUGCA | 117D | 81 |
| | UGCCUGCAG | | |
| crRNA 24 | CCACCCCAAUAUCGAAGGGGACUAAAACAUGACCAUGAUUACGCCAA | 117D | 82 |
| | GCUUGCAUG | | |
| crRNA 25 | CCACCCCAAUAUCGAAGGGGACUAAAACUAUGACCAUGAUUACGCCA | 117D | 83 |
| | AGCUUGCAU | | |
| crRNA 26 | CCACCCCAAUAUCGAAGGGGACUAAAACAGCUAUGACCAUGAUUACG | 117D | 84 |
| | CCAAGCUUG | | |
| crRNA 27 | CCACCCCAAUAUCGAAGGGGACUAAAACGAAACAGCUAUGACCAUGA | 117D | 85 |
| | UUACGCCAA | | |
| crRNA 28 | CCACCCCAAUAUCGAAGGGGACUAAAACACAGGAAACAGCUAUGACC | 117D | 86 |
| | AUGAUUACG | | |
| crRNA 29 | CCACCCCAAUAUCGAAGGGGACUAAAACAACACAGGAAACAGCUAUG | 117D | 87 |
| | ACCAUGAUU | | |
| crRNA 30 | CCACCCCAAUAUCGAAGGGGACUAAAACAAACACAGGAAACAGCUAU | 117D | 88 |
| | GACCAUGAU | | |
| crRNA 31 | CCACCCCAAUAUCGAAGGGGACUAAAACAUAAACACAGGAAACAGCU | 117D | 89 |
| | AUGACCAUG | | |
| crRNA 32 | CCACCCCAAUAUCGAAGGGGACUAAAACGGAUAAACACAGGAAACAG | 117D | 90 |
| | CUAUGACCA | | |
| crRNA 33 | CCACCCCAAUAUCGAAGGGGACUAAAACAGCGGAUAAACACAGGAAA | 117D | 91 |
| | CAGCUAUGA | | |
| crRNA 34 | CCACCCCAAUAUCGAAGGGGACUAAAACGAGCGGAUAAACACAGGAA | 117D | 92 |
| | ACAGCUAUG | | |
| Lsh_crRNA_DR | CCACCCCAAUAUCGAAGGGGACUAAAACUAGAUUGCUGUUCUACCAA | 120B | 93 |
| 28 | GUAAUCCAU | | |
| Lsh_crRNA_DR | ACCCCAAUAUCGAAGGGGACUAAAACUAGAUUGCUGUUCUACCAAGU | 120B | 94 |
| 26 | AAUCCAU | | |
| Lsh_crRNA_DR_ | CCCAAUAUCGAAGGGGACUAAAACUAGAUUGCUGUUCUACCAAGUAA | 120B | 95 |
| 24 | UCCAU | | |
| Lsh_crRNA_DR_ | CAAUAUCGAAGGGGACUAAAACUAGAUUGCUGUUCUACCAAGUAAUC | 120B | 96 |
| 22 | CAU | | |
| Lsh_crRNA_DR_ | AUAUCGAAGGGGACUAAAACUAGAUUGCUGUUCUACCAAGUAAUCCA | 120B | 97 |
| 20 | U | | |
| Lsh_crRNA_DR_ | UAUCGAAGGGGACUAAAACUAGAUUGCUGUUCUACCAAGUAAUCCAU | 120B | 98 |
| 19 | | | |
| Lsh_crRNA_DR_ | AUCGAAGGGGACUAAAACUAGAUUGCUGUUCUACCAAGUAAUCCAU | 120B | 99 |
| 18 | | | |
| Lsh_crRNA_24 | CCACCCCAAUAUCGAAGGGGACUAAAACUAGAUUGCUGUUCUACCAA | 120A | 100 |
| | GUAAU | | |
| Lsh_crRNA_23 | CCACCCCAAUAUCGAAGGGGACUAAAACUAGAUUGCUGUUCUACCAA | 120A | 101 |
| | GUAA | | |
| Lsh_crRNA_11 | CCACCCCAAUAUCGAAGGGGACUAAAACUAGAUUGCUGUUCUACCAA | 120A | 102 |
| | GUA | | |
| Lsh_crRNA_21 | CCACCCCAAUAUCGAAGGGGACUAAAACUAGAUUGCUGUUCUACCAA | 120A | 103 |
| | GU | | |
| Lsh_crRNA_20 | CCACCCCAAUAUCGAAGGGGACUAAAACUAGAUUGCUGUUCUACCAA | 120A | 104 |
| | G | | |
| Lsh_crRNA_19 | CCACCCCAAUAUCGAAGGGGACUAAAACUAGAUUGCUGUUCUACCAA | 120A | 105 |
| Lsh_crRNA_18 | CCACCCCAAUAUCGAAGGGGACUAAAACUAGAUUGCUGUUCUACCA | 120A | 106 |
| Lsh_crRNA_17 | CCACCCCAAUAUCGAAGGGGACUAAAACUAGAUUGCUGUUCUACC | 120A | 107 |
| Lsh_crRNA_16 | CCACCCCAAUAUCGAAGGGGACUAAAACUAGAUUGCUGUUCUAC | 120A | 108 |
| Lsh_crRNA_12 | CCACCCCAAUAUCGAAGGGGACUAAAACUAGAUUGCUGUU | 120A | 109 |
| Lsh_stem_1 | CCACCCGAAUAUCGAACGGGACUAAAACUAGAUUGCUGUUCUACCAA | 121A | 110 |
| | GUAAUCCAU | | |
| Lsh_stem_2 | CCACCGCAAUAUCGAAGCGGACUAAAACUAGAUUGCUGUUCUACCAA | 121A | 111 |
| | GUAAUCCAU | | |
| Lsh_stem_3 | CCACGCCAAUAUCGAAGGCGACUAAAACUAGAUUGCUGUUCUACCAA | 121A | 112 |
| | GUAAUCCAU | | |
| Lsh_stem_4 | CCAGCCCAAUAUCGAAGGGCACUAAAACUAGAUUGCUGUUCUACCAA | 121A | 113 |
| | GUAAUCCAU | | |
| Lsh_stem_5 | CCAGGGGGAAUAUCGAACCCCACUAAAACUAGAUUGCUGUUCUACCA | 121A | 114 |
| | AGUAAUCCAU | | |
| Lsh_stem_6 | CCACCACCAAUAUCGAAGGGGACUAAAACUAGAUUGCUGUUCUACCA | 121A | 115 |
| | AGUAAUCCAU | | |
| Lsh_stem_7 | CCAACCCAAUAUCGAAGGGGACUAAAACUAGAUUGCUGUUCUACCAA | 121A | 116 |
| | GUAAUCCAU | | |
| Lsh_stem_8 | CCACCCAAAUAUCGAAGGGGACUAAAACUAGAUUGCUGUUCUACCAA | 121A | 117 |
| | GUAAUCCAU | | |
| Lsh_stem_9 | CCACCCCCAAUAUCGAAGGGGGACUAAAACUAGAUUGCUGUUCUACC | 121A | 118 |
| | AAGUAAUCCAU | | |
| Lsh_loop_1 | CCACCCCAUAUCGAAGGGGACUAAAACUAGAUUGCUGUUCUACCAAG | 121B | 119 |
| | UAAUCCAU | | |
| Lsh_loop_2 | CCACCCCAUCGAAGGGGACUAAAACUAGAUUGCUGUUCUACCAAGUA | 121B | 120 |
| | AUCCAU | | |
| Lsh_loop_3 | CCACCCCAAGGGGACUAAAACUAGAUUGCUGUUCUACCAAGUAAUCC | 1219 | 121 |
| | AU | | |
| Lsh_loop_4 | CCACCCCAAAUAUCGAAGGGGACUAAAACUAGAUUGCUGUUCUACCA | 121B | 122 |
| | AGUAAUCCAU | | |
| Lsh_loop_5 | CCACCCCAAAAAUAUCGAAGGGGACUAAAACUAGAUUGCUGUUCUAC | 121B | 123 |
| | CAAGUAAUCCAU | | |
| Lsh_loop_6 | CCACCCCAAAAAAAAAUAUCGAAGGGGACUAAAACUAGAUUGCUGUU | 121B | 124 |
| | CUACCAAGUAAUCCAU | | |
| Lsh loop 7 | CCACCCCGAUAUCGAAGGGGACUAAAACUAGAUUGCUGUUCUACCAA | 121B | 125 |
| | GUAAUCCAU | | |
| Lsh_loop_8 | CCACCCCAAAAUCGAAGGGGACUAAAACUAGAUUGCUGUUCUACCAA | 121B | 126 |
| | GUAAUCCAU | | |
| Lsh_loop_9 | CCACCCCAAUAUCCAAGGGGACUAAAACUAGAUUGCUGUUCUACCAA | 121B | 127 |
| | GUAAUCCAU | | |
| Lsh_single_ | CCACCCCAAUAUCGAAGGGGACUAAAACAAGAUUGCUGUUCUACCAA | 122C | 128 |
| mismatch_pos1 | GUAAUCCAU | | |
| Lsh_single_ | CCACCCCAAUAUCGAAGGGGACUAAAACUAGAAUGCUGUUCUACCAA | 122C | 129 |
| mismatch_pos5 | GUAAUCCAU | | |
| Lsh_single_ | CCACCCCAAUAUCGAAGGGGACUAAAACUAGAUUGCAGUUCUACCAA | 122C | 130 |
| mismatch_pos9 | GUAAUCCAU | | |
| Lsh_single_ | CCACCCCAAUAUCGAAGGGGACUAAAACUAGAUUGCUGUUGUACCAA | 122C | 131 |
| mismatch_pos13 | GUAAUCCAU | | |
| Lsh_single_ | CCACCCCAAUAUCGAAGGGGACUAAAACUAGAUUGCUGUUCUACGAA | 122C | 132 |
| mismatch_pos17 | GUAAUCCAU | | |
| Lsh_single_ | CCACCCCAAUAUCGAAGGGGACUAAAACUAGAUUGCUGUUCUACCAA | 122C | 133 |
| mismatch_pos21 | GAAAUCCAU | | |
| Lsh_single_ | CCACCCCAAUAUCGAAGGGGACUAAAACUAGAUUGCUGUUCUACCAA | 122C | 134 |
| mismatch_pos25 | GAAAUCCAU | | |
| Lsh_single_ | CCACCCCAAUAUCGAAGGGGACUAAAACUAGAUUGCUGUUCUACCAA | 122C | 135 |
| mismatch_pos28 | GUAAUGCAU | | |
| Lsh_double_ | CCACCCCAAUAUCGAAGGGGACUAAAACUAGAUUGCUGUUCUACCAA | 122C | 136 |
| mismatch_pos1 | GUAAUCCAA | | |
| Lsh_double_ | CCACCCCAAUAUCGAAGGGGACUAAAACAUGAUUGCUGUUCUACCAA | 122D | 137 |
| mismatch_pos6 | GUAAUCCAU | | |
| Lsh_double_ | CCACCCCAAUAUCGAAGGGGACUAAAACUAGUUGCUGAACUACCAA | 122D | 138 |
| mismatch_pos11 | GUAAUCCAU | | |
| Lsh_double_ | CCACCCCAAUAUCGAAGGGGACUAAAACUAGAUUGCUGAACUACCAA | 122D | 139 |
| mismatch_pos16 | GUAAUCCAU | | |
| Lsh_double_ | CCACCCCAAUAUCGAAGGGGACUAAAACUAGAUUGCUGUUCUAGGAA | 122D | 140 |
| mismatch_pos21 | GUAAUCCAU | | |
| Lsh_double_ | CCACCCCAAUAUCGAAGGGGACUAAAACUAGAUUGCUGUUCUACCAA | 122D | 141 |
| mismatch_pos26 | GUAAUCGUU | | |

TABLE B
ssRNA targets used in this study.

| | | | SEQ |
|---|---|---|---|
| | | 1st | ID |
| Name | Target | FIG. | NO: |
| ssRNA 1 | GGCCAGUGAAUUCGAGCUCGGUACCCGGGGAUCCUCUAGAAAUAUGG | 117B | 142 |
| (C PAM) | AUUACUUGGUAGAACAGCAAUCUACUCGACCUGCAGGCAUGCAAGCUU | | |
| | GGCGUAAUCAUGGUCAUAGCUGUUUCCUGUGUUUAUCCGCUCACAAU | | |
| | UCCACACAACAUACGAGCCGGAAGCAUAAAG | | |
| ssRNA 2 | AAUAUGGAUUACUUGGUAGAACAGCAAUCUACAAAAAAAAAAAAAAA | 118B | 143 |
| | AAAAGAAAAAAAAAAAAAAAAAAAGAAAAAAAAAAAAAAAAAAAGAA | | |
| | AAAAAAAAAAAAAAAAAGAAAAAAAAAAAAAAAAAAAGAAAAAAAAA | | |
| | AAAAAAAAAAG | | |
| ssRNA 3 | AAUAUGGAUUACUUGGUAGAACAGCAAUCUACUUUUUUUUUUUUUUU | 118B | 144 |
| | UUUUCUUUUUUUUUUUUUUUUUUUCUUUUUUUUUUUUUUUUUUUCUU | | |
| | UUUUUUUUUUUUUUUUUCUUUUUUUUUUUUUUUUUUUCUUUUUUUUU | | |
| | UUUUUUUUUUC | | |
| ssRNA 4 | GGGUAGGUGUUCCACAGGGUAGCCAGCAGCAUCCUGCGAUGCAAAUA | 118C | 145 |
| | UGGAUUACUUGGUAGAACAGCAAUCUAAUCCGGAACAUAAUGGUGCA | | |
| | GGGCGCUGACUUCCGCGUUUCCAGACUUUACGAAACACGGAAACCGAA | | |
| | GACCAUUCAUGUUGUUGCUGCCGGAAGCAUAAAG | | |
| ssRNA 5 | GGGCCCCUCCGUUCGCGUUUACGCGGACGGUGAGACUGAAGAUAAUAU | 118C | 146 |
| | GGAUUACUUGGUAGAACAGCAAUCUAAACUCAUUCUCUUUAAAAUAU | | |
| | CGUUCGAACUGGACUCCCGGUCGUUUUAACUCGACUGGGGCCAAAACG | | |
| | AAACAGUGGCACUACCCCGCCGGAAGCAUAAAG | | |
| ssRNA 1 | GGCCAGUGAAUUCGAGCUCGGUACCCGGGGAUCCUCUAGAAAUAUGG | 117C | 147 |
| (G PAM) | AUUACUUGGUAGAACAGCAAUCUAGUCGACCUGCAGGCAUGCAAGCU | | |
| | UGGCGUAAUCAUGGUCAUAGCUGUUUCCUGUGUUUAUCCGCUCACAA | | |
| | UUCCACACAACAUACGAGCCGGAAGCAUAAAG | | |
| ssRNA 1 | GGCCAGUGAAUUCGAGCUCGGUACCCGGGGAUCCUCUAGAAAUAUGG | 117C | 148 |
| (A PAM) | AUUACUUGGUAGAACAGCAAUCUAAUCGACCUGCAGGCAUGCAAGCU | | |
| | UGGCUGAAUCAUGGUCAUAGCUGUUUCCUGUGUUUAUCCGCUCACAA | | |
| | UUCCACACAACAUACGAGCCGGAAGCAUAAAG | | |
| ssRNA 1 | GGCCAGUGAAUUCGAGCUCGGUACCCGGGGAUCCUCUAGAAAUAUGG | 117C | 149 |
| (U PAM) | AUUACUUGGUAGAACAGCAAUCUAUUCGACCUGCAGGCAUGCAAGCU | | |
| | UGGCGUAAUCAUGGUCAUAGCUGUUUCCUGUGUUUAUCCGCUCACAA | | |
| | UUCCACACAACAUACGAGCCGGAAGCAUAAAG | | |
| ssRNA 6 | ACCGAUCGUCGUUGUUUGGGCAAUGCACGUUCUCCAACGGUGCUCCUA | 124B | 150 |
| | UGGGGCACAAGUUGCAGGAUGCAGCGCCUUACAAGAAGUUCGCUGAA | | |
| | CAAGCAACCGUUACCCCCCGCGCUCUGAGAGCGGCUCUAUUGGUCCGA | | |
| | GACCAAUGUGCGCCGUGGAUCAGACACGCGGU | | |
| ssRNA 7 | ACUGUUGGUGGUGUAGAGCUUCCUGUAGCCGCAUGGCGUUCGUACUU | 124B | 151 |
| | AAAUAUGGAACUAACCAUUCCAAUUUUCGCUACGAAUUCCGACUGCGA | | |
| | GCUUAUUGUUAAGGCAAUGCAAGGUCUCCUAAAAGAUGGAAACCCGA | | |
| | UUCCCUCAGCAAUCGCAGCAAACUCCGGCAUCU | | |
| ssRNA 8 | GGUAACAUGCUCGAGGGCCUUACGGCCCCCGUGGGAUGCUCCUACAUG | 124B | 152 |
| | UCAGGAACAGUUACUGACGUAAUAACGGGUGAGUCCAUCAUAAGCGU | | |
| | UGACGCUCCCUACGGGUGGACUGUGGAGAGACAGGGCACUGCUAAGGC | | |
| | CCAAAUCUCAGCCAUGCAUCGAGGGGUACAAU | | |
| ssRNA 9 | UUCGUAAAACGUUCGUGUCCGGGCUCUUUCGCGAGAGCUGCGGCGCGC | 124B | 153 |
| | ACUUUUACCGUGGUGUCGAUGUCAAACCGUUUUACAUCAAGAAACCU | | |
| | GUUGACAAUCUCUUCGCCCUGAUGCUGAUAUUAAUCGGCUACGGGG | | |
| | UUGGGGAGUUGUCGGAGGUAUGUCAGAUCCACG | | |
| ssRNA 10 | AUAGGCCAGUGAAUUCGAGCUCGAAUAUGGAUUACUUGGUAGAACAG | 119D | 154 |
| | CAAUCUACGCCGGAAGCAUAAAG | | |
| ssRNA 10 | CUUUAUGCUUCCGGCGUAGAUUGCUGUUCUACCAAGUAAUCCAUAUUC | 119D | 155 |
| (rc) | GAGCUCGAAUUCACUGGCCUAU | | |
| ssDNA | ctttatgcttccggctcgtatgttgtgtggaattgtgagcggataaaca | 134D | 156 |
| target | caggaaacagctatgaccatgattacgccaagcttgcatgcctgcaggt | | |
| | cgagaatatggattacttggtagaacagcaatctactagaggatccccg | | |
| | ggtaccgagctcgaattcactggccccctatagtgagtcgtattaatttc | | |

TABLE C
Spacers used for in vivo experiments.

| | | | SEQ |
|---|---|---|---|
| | | 1st | ID |
| Name | Sequence | FIG. | NO: |
| spacer 1 | GAAGUUUGCAGCUGGAUACGACAGACGG | 1116D | 157 |
| spacer 2 | UGUCUGGAAGUUUGCAGCUGGAUACGAC | 1116D | 158 |
| spacer 3 | AGCUGGAUACGACAGACGGCCAUCUAAC | 1116D | 159 |
| spacer 4 | UACGUCGCGAUAUGUUGCACGUUGUCUG | 1116D | 160 |
| spacer 5 | UACGGACGACCUUCACCUUCACCUUCGAUUU | 123A | 161 |
| spacer 6 | UCGUACGGACGACCUUCACCUUCACCUUCGA | 123A | 162 |
| spacer 7 | CGGUCUGGGUACCUUCGUACGGACGACCUUC | 123A | 163 |
| spacer 8 | GCGGUCUGGGUACCUUCGUACGGACGACCUU | 123A | 164 |
| spacer 9 | AGCGGUCUGGGUACCUUCGUACGGACGACCU | 123A | 165 |
| spacer 10 | AGUUCAUAACACGUUCCCAUUUGAAACCUUC | 123A | 166 |
| spacer 11 | UUAACUUUGUAGAUGAACUCACCGUCUUGCA | 123A | 167 |
| spacer 12 | UUUAACUUUGUAGAUGAACUCACCGUCUUGC | 123A | 168 |
| spacer 13 | GUUUAACUUUGUAGAUGAACUCACCGUCUUG | 123A | 169 |
| spacer 35 | AAGUUUGCAGCUGGAUACGACAGACGGC | 119B | 170 |
| spacer 36 | ACAGGAUGUCCCAAGCGAACGGCAGCGG | 139 | 171 |
| spacer 37 | GCUUGUUCAGCGAACUUCUUGUAAGGCG | 129A | 172 |
| spacer 38 | UAAGCUCGCAGUCGGAAUUCGUAGCGAA | 129A | 173 |
| spacer 39 | CUICAACGCUBAUGAUGGACUCACCCGU | 129A | 174 |
| spacer 40 | UCAACAGGUUUCUUGAUGUAAAACGGUU | 129A | 175 |
| spacer 41 | AAGUUUGCAGCUGGAUACGACAGACGGC | 130 | 176 |
| spacer 42 | UUUGCAGCUGGAUACGACAGACGGCCAU | 130 | 177 |
| spacer 43 | CAGCUGGAUACGACAGACGGCCAUCUAA | 130 | 178 |
| spacer 44 | GUUGUCUGGAAGUUUGCAGCUGGAUACG | 130 | 179 |
| spacer 45 | GCGAUAUGUUGCACGUUGUCUGGAAGUU | 130 | 180 |
| spacer 46 | ACGUUGUCUGGAAGUUUGCAGCUGGAUA | 130 | 181 |
| spacer 47 | AUGUUGCACCUUGUCUGGAAGUUUCCAG | 130 | 182 |
| spacer 48 | UGCAGCUGGAUACGACAGACGGCCAUCU | 130 | 183 |
| spacer 49 | CUGGAAGUUUGCAGCUGGAUACGACAGA | 130 | 184 |
| spacer 50 | AGUUUGCAGCUGGAUACGACAGACGGCC | 130 | 185 |
| spacer 51 | GCUGGAUACGACAGACGGCCAUCUAACU | 130 | 186 |
| spacer 52 | GUUUGCAGCUGGAUACGACAGACGGCCA | 130 | 187 |
| spacer_41_ | UAGUUUGCAGCUGGAUACGACAGACGGC | 122A | 188 |
| single_ | | | |
| mismatch_pos1 | | | |
| spacer_41_ | AAGUAUGCAGCUGGAUACGACAGACGGC | 122A | 189 |
| single_ | | | |
| mismatch_pos5 | | | |
| spacer_41_ | AAGUUUGCUGCUGGAUACGACAGACGGC | 122A | 190 |
| single_ | | | |
| mismatch_pos9 | | | |
| spacer_41_ | AAGUUUGCAGCUCGAUACGACAGACGGC | 122A | 191 |
| single_ | | | |
| mismatch_pos13 | | | |
| spacer_41_ | AAGUUUGCAGCUGGAUUCGACAGACGGC | 122A | 192 |
| single_ | | | |
| mismatch_pos17 | | | |
| spacer_41_ | AAGUUUGCAGCUGGAUACGAGAGACGGC | 122A | 193 |
| single_ | | | |
| mismatch_pos21 | | | |
| spacer_41_ | AAGUUUGCAGCUGGAUACGACAGAGGGC | 122A | 194 |
| single_ | | | |
| mismatch_pos25 | | | |
| spacer_41_ | UUGUUUGCAGCUGGAUACGACAGACGGC | 122A | 195 |
| double_ | | | |
| mismatch_pos1 | | | |
| spacer_41_ | AAGUUACCAGCUGGAUACGACAGACGGC | 122A | 196 |
| double_ | | | |
| mismatch_pos6 | | | |
| spacer_41_ | AAGUUUGCAGGAGGAUACGACAGACGGC | 122A | 197 |
| double_ | | | |
| mismatch_pos11 | | | |
| spacer_41_ | AAGUUUGCAGCUGGAAUCGACAGACGGC | 122A | 198 |
| double_ | | | |
| mismatch_pos16 | | | |
| spacer_41_ | AAGUUUGCAGCUGGAUACGAGUGACGGC | 122A | 199 |
| double_ | | | |
| mismatch_pos21 | | | |

Heterologous Reconstitution of the L. shahii C2c2 Locus in Escherichia coli Confers RNA-Guided Immunity Against a RNA Bacteriophage

[1046] As a first step, we explored whether LshC2c2 could be used to confer immunity to MS2 Tamulaitis et al,, Programmable RNA shredding by the type III-A CRISPR-Cas system of Streptococcus thertnophilus. Mol Cell 56, 506-517 (2014)), a lytic single-stranded (ss) RNA phage without DNA intemiediates in its life cycle that readily infects E. coli. We constructed a low-copy plasmid carrying the entire LshC2c2 locus (pLshC2c2) to allow for heterologous reconstitution in E. coli (FIG. 126A). Given that expressed mature crRNAs from the LshC2c2 locus have a maximum spacer length of 28nt (FIG. 126A) (S. Shmakov et al., Discovery and Functional Characterization of Diverse Class 2 CRISPR-Cas Systems. Mol Cell 60, 385-397 (2015)), we synthesized a library of 3,473 spacer sequences tiling all possible 28-nt target sites in the MS2 phage genome and cloned them as spacers into the pLshC2c2 CRISPR array. After transformation in E. coli, cells were infected with MS2 and spacer sequences in cells that survived the infection were determined. Cells carrying spacers that confer robust interference against MS2 will proliferate more rapidly, leading to enrichment of these spacers following growth for 16 hours. A number of spacers were consistently enriched across two independent replicas, suggesting that they enabled strong interference against MS (107 spacers showed >1.3 log2-fold enrichment in both replicas; FIG. 116B and FIG. 127A-B). By analyzing the flanking regions of protospacer on the MS2 genome corresponding to the 107 enriched spacers, we found that spacers with G immediately adjacent to the 3′ end of the protospacer performed more poorly than those with an H (i.e. A, U, or C), indicating a single nucleotide PAM, H (FIG. 116C and FIG. 127C-D, 128).

[1047] To validate the interference activity of enriched spacers, we individually cloned four top-enriched spacers into pLshC2c2 CRISPR arrays and observed a 3- to 4-log reduction in plaque formation, consistent with the level of enrichment observed in the screen (FIG. 116E and FIG. 129). To confirm the PAM, we cloned sixteen guides targeting distinct regions of the MS2 mat gene (4 guides per possible single-nucleotide PAM). We found that all 16 crRNAs mediated MS2 interference, although higher levels of resistance were observed for the C, A, and U PAM-targeting guides (FIGS. 116D, 116E and FIG. 130), indicating that C2c2 can be effectively retargeted in a crRNA-dependent fashion to sites within the MS2 genome.

C2c2 is a Single-Effector EndoRNase that Mediates ssRNA Cleavage with a Single crRNA Guide

[1048] To test whether LshC2c2 mediated phage interference by facilitating crRNA-guided ssRNA cleavage, we purified the LshC2c2 protein (FIG. 131) and assayed its ability to cleave an in vitro transcribed 173-nt ssRNA target (FIG. 117A and FIG. 132) containing a C PAM protospacer (ssRNA target 1 with protospacer 14). Previously, we found that mature LshC2c2 crRNAs contain a 28-nt direct repeat (DR) and a 28 nt spacer (FIG. 126A) (S. Shmakov et Discovery and Functional Characterization of Diverse Class 2 CRISPR-Cas Systems. Mol Cell 60, 385-397 (2015)), and we therefore generated an in-vitro-transcribed crRNA with 28-nt spacer complementary to protospacer 14 on ssRNA target 1. We found that LshC2c2 efficiently cleaved. ssRNA in a Mg2+- and crRNA-dependent manner (FIG. 117B and FIG. 133). To investigate cleavage of dsRNA. substrates, we annealed complementary RNA oligos to regions flanking the crRNA target site. This partially double-stranded RNA substrate was not cleaved by .LshC2c2, indicating it is specific for ssRNA. (FIGS. 134A-B).

[1049] To further characterize the sequence constraints of RNA cleavage by LshC2c2, we tested additional crRNAs complementary to different versions of ssRNA target 1 where protospacer 14 is preceded by each PAM variant. The results of this experiment confirmed the preference for C, A, and U PAMs, with little cleavage activity detected for the G PAM target (FIG. 117C), Additionally, we designed 5 crRNAs for each possible PAM (20 total) across ssRNA target 1 and evaluated cleavage activity for LshC2c2 paired with each of these crRNAs. As expected, we found less cleavage activity for G PAM-targeting crRNAs compared to other crRNAs tested (FIG. 117D).

[1050] LshC2c2 was tested for DNA cleavage activity in vitro. We generated a dsDNA plasmid library with protospacer 14 preceded by 7 random nucleotides to account for any PAM requirements. When incubated with LshC2c2 protein and a crRNA complementary to protospacer 14, no cleavage of the dsDNA plasmid library was observed (FIG. 134C). We also did not observe cleavage when targeting a ssDNA version of ssRNA target 1 (FIG. 134D). To rule out co-transcriptional DNA cleavage which has been observed in type III CRISPR-Cas systems (P. Samai et al., Co-transcriptional DNA and RNA Cleavage during Type III CRISPR-Cas Immunity. Cell 161, 1164-1174 (2015)), we recapitulated the E. coli RNA polymerase co-transcriptional cleavage assay (P. Samai et at, Co-transcriptional DNA and RNA Cleavage during Type III CRISPR-Cas Immunity. Cell 161, 1164-1174 (2015)) (FIG. 135A), expressing ssRNA target 1 from a DNA substrate. Using this assay with the purified LshC2c2 and crRNA targeting ssRNA target 1, we still did not observe any DNA cleavage (FIG. 135B). Together, these results indicate that C2c2 cleaves specific ssRNA sites directed by the target complementarity encoded in the crRNA, with a 3′ H PAM requirement.

### C2c2 Cleavage Depends on Local Target Sequence and Secondary Structure

[1051] Given that C2c2 did not efficiently cleave dsRNA. substrates and that ssRNA forms complex secondary structures, we reasoned that cleavage by C2c2 might be affected by secondary structure of the ssRNA target. In tiling ssRNA target 1 with different crRNAs (FIG. 117D), the same cleavage pattern was observed regardless of the crRNA position along the target RNA, suggesting that the crRNA-dependent cleavage pattern was determined by some features of the target sequence rather than the distance from the binding site. We hypothesized that the LshC2c2-crRNA complex binds the target and cleaves exposed regions of ssRNA within the secondary structure elements, with a potential preference for certain nucleotides. We analyzed the cleavage efficiencies of homopolymer RNA targets (a 28-nt protospacer extended with 120 As or Us regularly interspaced by single bases of Ci or C to enable oligo synthesis) and found that LshC2c2 preferentially cleaved the uracil target compared to adenine (FIG. 118A-B), To assess the impact of the target RNA on the cleavage pattern, we tested cleavage of three ssRNA. targets with different sequences flanking a constant 28-nt protospacer and found three distinct patterns of cleavage (FIG. 118C). RNA-sequencing of the cleavage products for the three targets revealed that cleavage sites mainly localized to uracil-rich regions of ssRNA or ssRNA-dsRNA junctions within the in silico predicted co-folds of the target sequence with the crRNA (FIG. 118D-I).

The HEPN Domains of C2c2 Mediate RNA-Guided ssRNA-Cleavage

[1052] Previous bioinformatics analysis of C2c2 suggested that the HEPN domains are potentially responsible for the catalytic activity we observed (S. Shmakov et al., Discovery and Functional Characterization of Diverse Class 2 CRISPR-Cas Systems. Mol Cell 60, 385-397 (2015)). Each of the two HEPN domains of C2c2 contains a dyad of conserved arginine and histidine residues (FIG. 119A), in agreement with the catalytic mechanism of the HEPN endoRNAse (V. Anantharaman, K. S. Makarova, A. M. Burroughs, E. V. Koonin, L. Aravind, Comprehensive analysis of the HEPN superfamily; identification of novel roles in intra-genornic conflicts, defense, pathogenesis and RNA processing. Biol Direct 8, 15 (2013); O. Niewoehner, M, Erick, Structural basis for the endoribonuclease activity of the type III-A CRISPR-associated protein Csm6. RNA 22. 318-329 (2016); N. F. Sheppard, C. V. Glover, 3rd, R. M, Terns, M. P. Terns, The CRISPR-associated Csxl protein of Pyrococcus furiosus is an adenosine-specific endoribonuclease. RNA 22, 216-224 (2016)). To test whether these predicted catalytic residues were required for ssRNA depletion in vivo, we mutated each residue separately to alanine (R597A, H602A, R1278A, H1283A) in the LshC2c2 locus plasmids and assayed for MS2 interference. None of the four mutant plasmids were able to protect E. coli from phage infection (FIG. 119B and FIG. 136).

[1053] In order to validate these findings in vitro, the four single-point mutant proteins were purified and assayed their ability to cleave 5′-end-labeled ssRNA target 1 (FIG. 119C). In agreement with our in vivo results, all four mutations abolished cleavage activity. The inability of either of the two wild-type HEPN domains to compensate for inactivation of the other implies cooperation between the two domains, which agrees with observations that several bacterial and eukaryotic single-HEPN proteins function as dimers (O. Niewoehner, M. Jinek, Structural basis for the endoribonuclease activity of the type CRISPR-associated protein Csm6. RNA 22, 318-329 (2016); N. F. Sheppard, C. V. Glover, 3rd, R. M. Terns, M. P. Terns, The CRISPR-associated Csxl protein of Pyrococcus furiosus is an adenosine-specific endoribonuclease. RNA 22, 216-224 (2016); G. Kozlov et al., Structural Basis of Defects in the Sacsin HEPN Domain Responsible for Autosomal Recessive Spastic Ataxia of Charlevoix-Saguenay (ARSACS). J Biol Chem 286, 20407-20412 (2011)).

[1054] Catalytically inactive variants of Cas9 retain target DNA binding, allowing for the creation of programmable DNA-binding proteins (G. Gasiunas, R. Barrangou, P. Horvath, V. Siksnys, Cas9-crRNA ribonucleoprotein complex mediates specific DNA cleavage for adaptive immunity in bacteria. Proc Natl Acad Sci USA 109, E2579-2586 (2012); M. Jinek et al., A programmable dual-RNA-guided DNA endonuclease in adaptive bacterial immunity. Science 337, 816-821 (2012)). To determine if target binding and cleavage activity of LshC2c2 are likewise separable, electrophoretic mobility shift assays (ELISA) were performed on both the wild-type (FIG. 119D) and R1278A mutant LshC2c2 (FIG. 119E) in complex with crRNA. The wild-type LshC2c2 complex bound strongly (KD˜46 nM, FIG. 137A) and specifically to ssRNA target 10, but not to the non-target ssRNA (the reverse complement of ssRNA target 10), The R1278A. mutant C2c2 complex showed an even stronger (KD 7 nM, FIG. 137B) specific binding, indicating that this HEPN mutation results in a catalytically inactive, RNA-programmable RNA-binding protein. The LshC2c2 protein or crRNA alone showed substantially reduced levels of target affinity as expected (FIG. 137C-E).

[1055] These results demonstrate that C2c2 cleaves RNA using a catalytic mechanism distinct from other known CRISPR-associated. RNases. In particular, the type III Csm and Cmr multiprotein complexes rely on acidic residues of RRM domains for catalysis, whereas C2c2 achieves RNA cleavage through conserved basic residues of its two HEPN domains.

Sequence and Structural Requirements of C2c2 crRNA

[1056] Similar to the type V-B (Cpf1) systems (B. Zetsche et Cpf1 is a single RNA-guided endonuclease of a class 2 CRISPR-Cas system. Cell 163, 759-771 (2015)), the LshC2c2 crRNA contains a single stem loop in the direct repeat (DR), suggesting that the secondary structure of the crRNA could facilitate interaction with LshC2c2. To explore this possibility, we first investigated the length requirements of the spacer sequence for ssRNA cleavage and found that LshC2c2 requires spacers of at least 22 nt length to efficiently cleave ssRNA target 1 (FIG. 120A). We also found that the stem-loop structure of the crRNA. is critical for ssRNA cleavage because DR truncations that disturbed the stem loop abrogated target cleavage (FIG. 120B). Thus, a DR longer than 24 nt is required to maintain the stem loop necessary for LshC2c2 to mediate ssRNA cleavage.

[1057] Next, we studied the effects of modifications in the stem and loop of the crRNA DR on the cleavage activity. Single basepair inversions in the stem that preserved the stem structure did not affect the activity of the LshC2c2 complex but inverting all four G-C pairs in the stern eliminated the cleavage despite maintaining the duplex structure (FIG. 121A). Other perturbations that introduced kinks and reduced or increased base-pairing in the stem also eliminated or significantly suppressed cleavage, suggesting that the crRNA stem length is important for complex formation and activity (FIG. 121A). Through a series of modifications, we found that loop deletions eliminated cleavage, whereas insertions and substitutions mostly maintained some level of cleavage activity (FIG. 121B). Together, these results demonstrate that LshC2c2 recognizes structural characteristics of its cognate crRNA but is amenable to loop insertions and most tested base substitutions. These results have implications for the future application of C2c2-based tools that require guide engineering for recruitment of effectors or modulation of activity (S. Kiani et al., Cas9 gRNA engineering for genome editing, activation and repression. Nat Methods 12, 1051-1054 (2015); S. Konermann et al., Genome-scale transcriptional activation by an engineered CRISPR-Cas9 complex. Nature 517, 583-588 (2015); J. E. Dahlman et al., Orthogonal gene knockout and activation with a catalytically active Cas9 nuclease. Nat Biotechnol 33, 1159-1161 (2015)).

C2c2 Cleavage is Sensitive to Double Mismatches in the crRNA-Target Duplex

[1058] We tested the sensitivity of the LshC2c2 system to single mismatches between the crRNA guide and target RNA by mutating single bases across the spacer to the respective complementary bases (e.g., A to U) and quantified plaque formation with these mismatched spacers in the infection assay (FIG. 122A and FIG. 138). We found that C2c2 was fully tolerant to single mismatches across the spacer as such mismatched spacers interfered with phage propagation with similar efficiency as fully matched spacers. However, when we introduced consecutive double substitutions in the spacer, we found ˜3 log-fold reduction in the protection for mismatches in the center, but not at the 5′- or 3′-end, of the crRNA (FIG. 122B and FIG. 138). This observation indicates the presence of a mismatch-sensitive “seed region” in the center of the crRNA-target duplex.

[1059] We further evaluated the requirements of LshC2c2 for the guide and target to match in vitro. To this end, we generated a set of in vitro transcribed crRNAs with mismatches similarly positioned across the spacer region. When incubated with LshC2c2 protein, all single mismatched crRNA supported cleavage (FIG. 122C), in agreement with our in vivo findings. When tested with a set of consecutive double mutant crRNAs, LshC2c2 was unable to cleave the target RNA if the mismatches were positioned in the center, but not at the 5′- or 3′-end of the crRNA (FIG. 122D), supporting the existence of a core seed region.

[1060] Sensitivity of the LshC2c2 system to double and triple mismatches was also evaluated. Double mismatches were spaced apart (FIG. 143A) whereas triple mismatches were consecutive (FIG. 143B). Cleavage sensitivity was position dependent. Mismatches proximal to the DR region did not support cleavage whereas distal mismatches supported detectable cleavage.

[1061] The LshC2c2 system is also sensitive to mismatches and deletions in the direct repeat region. Single mismatches and single base deletions were generally sufficient to disrupt ssRNA cleavage, Only one mismatch (mutant 7) supported a low level of cleavage activity (FIG. 144).

C2c2 Can Be Reprogrammed to Mediate Specific snRNA Knockdown In Vivo

[1062] Given the ability of C2c2 to cleave target ssRNA in a crRNA sequence-specific manner, we tested whether LshC2c2 can be reprogrammed to degrade selected non-phage ssRNA targets, and particularly mRNAs, in vivo. To this end, we co-transformed E. coli with a plasmid encoding LshC2c2 and a crRNA targeting the mRNA of red fluorescent protein (UP) as well as a compatible plasmid expressing RFP (FIG. 123A). We observed an approximately 20% to 92% decrease in RFP positive cells for crRNAs targeting protospacers flanked by C, A, or U PAMs for OD-matched samples (FIG. 123B, C). As a control, we tested crRNAs containing reverse complements (targeting the dsDNA plasmid) of the top performing RFP mRNA-targeting spacers. As expected, we observed no decrease in RFP fluorescence by these crRNAs (FIG. 123B), We also confirmed that mutation of the catalytic arginine residues in either HEPN domain to alanine precluded RFP knockdown (FIG. 139). Thus, C2c2 is capable of general retargeting to arbitrary ssRNA substrates, governed exclusively by predictable nucleic-acid interactions.

[1063] When we examined the growth rate of cells carrying the RFP-targeting spacer with the greatest level of RFP knockdown, we noted that the rate was significantly reduced (FIG. 123A, spacer 7). To determine the cause for this growth restriction, we investigated whether the effect on growth was mediated by the RFP mRNA-targeting activity of LshC2c2 by introducing an inducible-RFP plasmid and an RFP-targeting LshC2c2 locus into E. coli. Using this system, we found that upon induction of RFP transcription, cells with RFP knockdown showed substantial growth suppression, which was not observed in non-targeting controls (FIG. 123D, E). However, in the absence of RFP transcription, we did not observe any growth restriction nor did we observe any transcription-dependent DNA targeting in our biochemical experiment (FIG. 135), which suggests that RNA-targeting is likely the primary driver of this growth restriction phenotype. Without wishing to be bound by theory, one possible explanation for this effect is that C2c2 CRISPR systems might function to prevent virus reproduction by indiscriminately cleaving cellular mRNAs and causing reduced cell division, programmed cell death (PCD) or dormancy (K. S. Makarova, Y. I. Wolf, E. V. Koonin, Comprehensive comparative-genomic analysis of type 2 toxin-antitoxin systems and related mobile stress response systems in prokaryotes, Biol Direct 4, 19 (2009); F. Hayes, L. Van Melderen, Toxins-antitoxins: diversity, evolution and function. Crit Rev Biochem Mol Biol 46, 386-408 (2011)).

C2c2 Cleaves Collateral RNA in Addition to crRNA-Targeted ssRNA

[1064] In contrast to Cas9 and Cpf1, which cleave DNA within the crRNA-target heteroduplex at a defined position, reverting into an inactive state after cleavage, C2c2 cleaves the target RNA outside of the crRNA binding site at varying distances depending on flanking sequence, presumably within exposed ssRNA loop regions (FIG. 118D-I). This observed flexibility in cleavage distance lead us to consider the possibility of cleavage of nearby non-target ssRNAs upon C2C2 target binding and activation. Accordingly, C2c2 could cause PCD through a two-part mechanism: a priming stage in which C2c2-crRNA complexes bind to target sites and cleave ssRNA in a crRNA-guided fashion and a second stage in which primed C2c2 cleaves non-targeted, collateral RNA non-specifically. To test this hypothesis, we carried out in vitro cleavage reactions that included, in addition to LshC2c2, crRNA and its target RNA, one of four unrelated RNA molecules without any complementarity to the crRNA guide (FIG. 124A), These experiments showed that, whereas the LshC2c2-crRNA complex did not mediate cleavage of any of the four collateral RNAs in the absence of the target RNA, all four were efficiently degraded in the presence of the target RNA (FIG. 124B and FIG. 140A). Furthermore, R597A and R1278A HEPN mutants were unable to cleave collateral RNA (FIG. 140B). These results indicate a HEPN-dependent mechanism whereby C2c2 in a complex with crRNA is activated upon binding to target RNA and subsequently cleaves any nearby ssRNA targets. Such promiscuous RNA cleavage may cause cellular toxicity, resulting in the observed growth rate inhibition. These findings imply that, in addition to their role in direct suppression of RNA viruses, type VI CRISPR-Cas systems could function as mediators of a distinct variety of PCD/dormancy induction that is specifically triggered by the cognate invader genomes (FIG. 125), Under this scenario, dormancy would slow the infection and supply additional time for adaptive immunity to succeed; when adaptive immunity fails, the suicidal role of C2c2 would prevail and spread of the infection would be limited. Such a mechanism falls within the previously proposed scheme of coupling between adaptive immunity and PCD during the CRISPR-Cas defensive response (K. S. Makarova, V. Anantharaman, L. Aravind, E. V. Koonin, virus-free or die: coupling of antivirus immunity and programmed suicide or dormancy in prokaryotes. Bial Direct 7, 40 (2012)).

### Example 8

### Expression of C2c2 in Eukaryotic Cells

[1065] A number of C2c2 orthologues were codon optimized for expression in mammalian cells using a mammalian expression vector. The various C2c2 orthologues were transfected in HEK293T cells and cellular localization was evaluated based on mCerry expression. Cytoplasmic localization as well as nuclear localization of the C2c2 protein was observed.

### Example 9

### Activity of C2c2 Eukaryotic Cells

[1066] A luciferase targeting assay was performed with different gRNAs directed against the C2c2 protein. Efficient knockdown was observed.

[1067] A targeting assay based on GFP expression was performed with gRNAs directed against EGFP. Expression of GFP was determined and compared to non-targeting (NT) gRNA. Here too efficient knockdown was observed.

[1068] A targeting assay was performed on different endogenous target genes in HEK293 cells with gRNAs directed against endogenous target genes. C2c2. Expression protein expression of the respective target genes was determined (compared to non-targeting (NT) gRNA). Efficient knockdown of the different target genes was observed.

### Methodology for the Examples

### Cloning of C2c2 Locus and Screening Library

[1069] Genomic DNA from Leptotrichia shahii DSM 19757 (ATCC) was extracted using the Blood & Cell Culture DNA Mini Kit (Qiagen) and the C2c2 CRISPR locus was PCR amplified and cloned into a pACYC184 backbone with chloramphenicol resistance. For retargeting of the locus to MS2 phage or endogenous targets, the wild type spacers in the array were removed and replaced with a Eco31I landing site an additional spacer and a degenerate repeat, compatible with Golden Gate cloning.

[1070] A custom library consisting of all possible spacers targeting the genome of the bacteriophage MS2, excluding spacers containing the Eco31I restriction site, was synthesized by Twist Biosciences, cloned into the retargeting backbone with Golden Gate cloning, transformed into Endura Duo electrocompetent cells (Lucigen) and subsequently purified using a NucleoBond Xtra MaxiPrep EF (Machery-Nagel).

### Bacterial Interference Assay

[1071] For the phage screen, 50 ng of the plasmid library were transformed into NovaBlue(DE3) Competent Cells (EMI) Millipore) followed by an outgrowth at 37° C. for 30 minutes. Cells were then grown in Luria broth (LB) supplemented with 25 μg/mL chloramphenicol (Sigma) in a volume of 4.5 mL. Phage conditions were treated with 7*10̂10 PFU of Bacteriophage MS2 (ATCC). After 3 hours of shaking incubation at 37° C., samples were plated on LB-agar plates supplemented with chloramphenicol and harvested after 16 hours. DNA was extracted using NucleoBond Xtra MaxiPrep EF (Machery-Nagel), PCR amplified, and sequenced using a MiSeq (IIlumina) with a paired-end 150 cycle kit.

[1072] To determine enriched spacers, spacer regions were extracted, counted, and normalized to total reads for each sample. For a given PAM, enrichment was measured as the log ratio compared to input library, with a 0.01 psuedocount adjustment. PAMs above a 1.3 enrichment threshold that occurred in both biological replicates were used to generate sequence logos (G. E. Crooks, G. Hon, J. M. Chandonia, S. E. Brenner, WebLogo: a sequence logo generator. Genome research 14, 1188-1190 (2004)).

[1073] To test individual spacers for MS2 interference, the oligos were ordered from IDT, annealed and phosphorylated with polynucleotide kinase (New England Biosciences) and cloned into the locus backbone with Golden Gate cloning. Plasmids were transformed into C3000 strain E. coli, made competent with the Mix and. Go kit (Zymo Research). C3000 cells were seeded from an overnight culture grown to OD600 of 2, at which point they were diluted 1:13 in Top Agar and poured on LB-chloramphenicol plates. Dilutions of MS2 phage were then spotted on the plates using a multichannel pipette, and the creation of plaques was recorded after overnight incubation.

### REP Targeting Assay

[1074] An ampicillin resistant RFP-expressing plasmid (pRFP) was transformed into DH5-alpha cells (New England Biolabs). Cells containing pREP were then made chemically competent (Zymo Research Mix and Go) to be used for downstream targeting experiments with pLshC2c2. Spacers targeting REP mRNA were cloned into pLshC2c2 and these plasmids were transformed into the chemically competent DH5-alpha pRFP cells. Cells were then grown overnight under double selection in LB and subjected to analysis by flow cytometry when they reached an OD600 of 4.0. Knockdown efficiency was quantified as the percent of RFP positive cells compared to a non-targeting spacer control (the endogenous LshC2c2 locus in pACYC 184).

[1075] To interrogate the effect of LshC2c2 activity on the growth of the host cells, we created a TetR-inducible version of the RFP plasmid in pBR322 (pBR322 RFP). We transfortned E. coli cells with this vector and then made them chemically competent (Zymo Research Mix and Go) to prepare them for downstream experiments. We cloned pLshC2c2 plasmids with various spacers targeting REP mRNA as well as their reverse complement controls and transformed them into E. coli cells carrying pBR322 RFP and streaked them on double-selection plates to maintain both plasmids. Colonies were then picked and grown overnight in LB with double selection. Bacteria were diluted to an OD600 of 0.1 and grown at 37 C for 1 hour with chloramphenicol selection only. REP expression was then induced using 350 ng/mL of anhydrotetracycline and OD measurements were taken every 5 minutes under continuous shaking in a BioTek Synergy 2 microplate reader.

### C2c2 Nucleic Acid Preparation

[1076] The mammalian codon-optimized gene for C2c2 (Leptotrichia shahii) was synthesized (GenScript) and cloned into a bacterial expression plasmid. E. coli cells (BL21(DE3)) were transformed and grown overnight at 37° C. The protein was then purified using histidine-tags and Ni-NTA affinity columns and then further purified using FPLC gel filtration.

[1077] Nucleic acid templates for T7 transcription were synthesized from IDT. Templates for crRNAs were annealed to a short T7 primer and incubated with T7 polymerase overnight at 37° C. Templates for targeting in nuclease assays were made double stranded using PCR and then incubated with T7 polymerase at 30° C. overnight.

[1078] 5′ end labeling was accomplished using the 5′ oligonucleotide kit (VectorLabs) and with a maleimide-W800 probe (Licor). 3′ end labeling was performed using a 3′ oligonucleotide labeling kit (Sigma) using ddUTP-Cy5. Labeled probes were purified using Clean and Concentrator columns (Zymo).

### C2c2 Protein Purification

[1079] The mammalian codon-optimized gene for C2c2 (Leptotrichia shahii) was synthesized (GenScript) and cloned into a bacterial expression vector (6-His-MBP-TEV-Cpf1, a pET based vector kindly given to us by Doug Daniels (“6-His” disclosed as SEQ ID NO: 200)). 12 liters of Terrific Broth growth media with 100 μg/mL ampicillin was inoculated with 10 mL overnight culture One Shot® BL21(DE3)pLysE (Invitrogen) cells containing the LshC2c2 expression construct. Growth media plus inoculant was grown at 37° C. until the cell density reached 0.2 OD600, then the temperature was decreased to 21° C. Growth was continued until OD600 reached 0.6 when a final concentration of 500 μM IPTG was added to induce MBP-C2c2 expression. The culture was induced for 14-18 hours before harvesting cells and freezing at −80° C. until purification.

[1080] Cell paste was resuspended in 200 mL of Lysis Buffer (50 mM Hepes pH 7, 2M NaCl, 5 mM MgCl2, 20 mM imidazole) supplemented with protease inhibitors (Roche complete, EDTA-free) and lysozyme. Once homogenized, cells were lysed by sonication (Branson Sonifier 450) then centrifuged at 10,000 g for 1 hour to clear the lysate. The lysate was filtered through 0.22 micron filters Stericup) applied to a Ni-NTA superflow nickel resin (Qiagen), washed, and then eluted with a gradient of imidazole. Fractions containing protein of the expected size were pooled, TEV protease (Sigma) was added, and the sample was dialyzed overnight into TEV buffer (500 mM NaCl, 50 mM Hepes pH 7, 5 mM MgCl, 2 mM DTT). After dialysis, TEV cleavage was confirmed by SDS-PAGE, and the sample was concentrated to 500 μL prior to loading on a gel filtration column (HiLoad 16/600 Superdex 200) via. FPLC (AKTA Pure). Fractions from gel filtration were analyzed by SDS-PAGE; fractions containing C2c2 were pooled and concentrated to 200 μL and either used directly for biochemical assays or frozen at −80° C. for storage. Gel filtration standards were run on the same column equilibrated in 2M NaCl, Hepes pH 7.0 to calculate the approximate size of LshC2c2.

### Nucleic Acid Target Preparation

[1081] DNA oligo templates for T7 transcription were ordered from IDT. Templates for crRNAs were annealed to a short T7 primer and incubated with T7 polymerase overnight at 30° C. using the HiScribe T7 Quick High Yield RNA Synthesis kit (New England Biolabs). Target templates were PCR amplified to yield dsDNA and then incubated with T7 polymerase at 30° C. overnight using the same kit.

[1082] 5′ end labeling was accomplished using the 5′ oligonucleotide kit (VectorLabs) and with a maleimide-IR800 probe (Livor). 3′ end labeling was performed using a 3′ oligonucleotide labeling kit (Sigma) using ddUTP-Cy5. Labeled probes were purified using Clean and Concentrator columns (Zymo Research).

### Nuclease Assay

[1083] Nuclease assays were performed with 160nM of end-labeled ssRNA target, 200 nM purified LshC2c2, and 100 nM crRNA, unless otherwise indicated, in nuclease assay buffer (40 mM Tris-HCl, 60 mM NaCI, 6 mM MgCl2, pH 7.3). Reactions were allowed to proceed for 1 hour at 37° C. (unless otherwise indicated) and were then quenched with proteinase K and EDTA for 15 minutes at 37° C. The reactions were then denatured with 6M urea denaturing buffer at 95° C. for 5 minutes. Samples were analyzed by gel electrophoresis on 10% PAGE TBE-Urea run at 45° C. Gels were imaged using a Licor Odyssey scanner.

### Electrophoretic Mobility Shift Assay

[1084] Target ssRNA Binding Experiments were Performed with a Series of Half-Log Complex dilutions (crRNA and LshC2c2) from 2 μM to 0.2 pM (or 1 μM to 0.1 pM in the case of R1278A LshC2c2). Binding assays were performed in nuclease assay buffer supplemented with 10 mM EDTA to prevent cutting, 5% glycerol, and 1.0 μg/mL heparin in order to avoid non-specific interactions of the complex with target RNA. Reactions were incubated at 37° C. for 20 minutes and then resolved on 6% PAGE TBE gels at 4° C. (using 0.5× TBE buffer). Gels were imaged using the Licor Odyssey scanner.

### NGS of In Vitro Cleaved RNA

[1085] In vitro nuclease assays were performed as described above using unlabeled ssRNA targets. After one hour, samples were quenched with proteinase K+EDTA and then column purified (Zymo Clean and Concentrator). The RNA samples were then PNK and 5′ polyphosphatase treated (Epicentre) before preparing a library for NGS using NEBNext Small RNA Library Prep Set for Illumina sequencing. Libraries were sequenced on an Illumina MiSeq to sufficient depth and analyzed using the alignment tool BWA (H. Li, R. Durbin, Fast and accurate short read alignment with Burrows-Wheeler transform. Bioinformatics 25, 1754-1760 (2009)).

### In Vitro Co-Transcriptional DNA Cleavage Assay

[1086] The E. coli RNAP co-transcriptional DNA cleavage assay was performed essentially as described previously (Samai et al., Cell, 2015). Briefly, 0.8pmol of ssDNA template strand were annealed with 1.6 pmol of RNA in transcription buffer (from E. coli RNAP core enzyme New England Biolabs) without magnesium to prevent RNA hydrolysis. 0.75 ul of E. coli RNAP core enzyme and Magnesium were added and the reaction incubated at 25° C. for 30 min and then transferred to 37° C. 1 pmol of freshly denatured nontemplate strand (NTS) were added and incubated at 37° C. for 15 min to obtain elongation complexes (ECs). 4 pmol of LshC2C2-crRNA complexes along with 1.25 mM of RNTPs were added to the ECs and transcription was allowed to proceed for 1 h at 37° C. DNA was resolved on a 10% PAGE TBE-Urea gels following RNase and proteinase K treatment.

[1087] Aspects of the invention are further described in the following numbered paragraphs:
[1088] 1. A method of modifying a target locus of interest, the method comprising delivering to said locus a non-naturally occurring or engineered composition comprising a C2c2 effector protein and one or more nucleic acid components, wherein the effector protein forms a complex with the one or more nucleic acid components, the one or more nucleic acid components directs the complex to the target locus of interest and the complex binds to the target locus of interest.
[1089] 2. The method of numbered paragraph 1, wherein the target locus of interest comprises RNA.
[1090] 3. The method of numbered paragraph 1 or 2, wherein the modification of the target ocus of interest comprises a nucleotide strand break.
[1091] 4. The method of numbered paragraph 1 or 2, wherein the C2c2 effector protein is codon optimized for expression in a eukaryotic cell.
[1092] 5. The method of numbered paragraph 1 or 2, wherein the C2c2 effector protein is associated with one or more functional domains; and optionally the effector protein contains one or more mutations optionally within an HEPN Domain, such as R597.4, H602A, R1278A, and/or H1283A, whereby the complex can deliver an epigenentic modifier or a transcriptional or translational activation or repression signal.
[1093] 6. The method of numbered paragraph 5, wherein the functional domain modifies transcription or translation of the target locus.
[1094] 7. The method of any one of numbered paragraphs 1 to 6, wherein the C2c2 effector protein comprises at least one or more nuclear localization signals.
[1095] 8. The method of numbered paragraph 1, wherein the target locus of interest is provided via a nucleic acid molecule in vitro.
[1096] 9. The method of numbered paragraph 1, wherein the target locus of interest is provided via a nucleic acid molecule within a cell.
[1097] 10. The method of numbered paragraph 9, wherein the cell comprises a prokaryotic cell.
[1098] 11. The method of numbered paragraph 9, wherein the cell comprises a eukaryotic cell.
[1099] 12. The method of any one of the preceding numbered paragraph, wherein when in complex with the effector protein the nucleic acid component(s) is capable of effecting sequence specific binding of the complex to a target sequence of the target locus of interest.
[1100] 13. The method of any one of the preceding numbered paragraphs, wherein the nucleic acid component(s) comprise a dual direct repeat sequence.
[1101] 14. The method of any one of the preceding numbered paragraphs, wherein the effector protein and nucleic acid component(s) are provided via one or more polynucleotide molecules encoding the polypeptides and/or the nucleic acid component(s), and wherein the one or more polynucleotide molecules are operably configured to express the polypeptides and/or the nucleic acid component(s).
[1102] 15. The method of numbered paragraph 14, wherein the one or more polynucleotide molecules comprise one or more regulatory elements operably configured to express the polypeptides and/or the nucleic acid component(s), optionally wherein the one or more regulatory elements comprise a promoter(s) or inducible promotor(s).
[1103] 16. The method of numbered paragraph 14 or 15, wherein the one or more polynucleotide molecules are comprised within one or more vectors.
[1104] 17. The method of numbered paragraph 14 or 15, wherein the one or more polynucleotide molecules are comprised within one vector.
[1105] 18. The method of numbered paragraph 16 or 17, wherein the one or more vectors comprise viral vectors.
[1106] 19. The method of numbered paragraph 18, wherein the one or more viral vectors comprise one or more retroviral, lentiviral, adenoviral, adeno-associated or herpes simplex viral vectors.
[1107] 20. The method of any one of numbered paragraph 14 to 15 wherein the one or more polynucleotide molecules are comprised in a delivery system, or the method of numbered paragraph 16 or 17 wherein the one or more vectors are comprised in a delivery system, or the method of any one of numbered paragraphs 1-13 wherein the assembled complex are comprised in a delivery system.
[1108] 21. The method of any one of the preceding numbered paragraphs, wherein the non-naturally occurring or engineered composition is delivered via a delivery vehicle comprising liposome(s), particle(s), exosome(s), microvesicle(s), a gene-gun or one or more viral vector(s).
[1109] 22. A non-naturally occurring or engineered composition which is a composition having the characteristics as defined in any one of the preceding numbered paragraphs.
[1110] 23. A non-naturally occurring or engineered composition comprising a C2c2 effector protein and one or more nucleic acid components, wherein the effector protein forms a complex with the one or more nucleic acid components, the one or more nucleic acid components directs the complex to the target of interest and the complex binds to the target locus of interest.
[1111] 24. The composition of numbered paragraph 23, wherein the target locus of interest comprises RNA.
[1112] 25. The composition of numbered paragraph 23 or 24, wherein the modification of the target locus of interest comprises a nucleotide strand break.
[1113] 26. The composition of numbered paragraph 23 or 24, wherein the C2c2 effector protein is codon optimized for expression in a eukaryotic cell.
[1114] 27. The composition of numbered paragraph 23 or 24, wherein the C2c2 effector protein is associated with one or more functional domains; and optionally the effector protein contains one or more mutations optionally within an HEPN Domain, such as R597A, R602A, R1278A, and/or H1283A, whereby the complex can deliver an epigenentic modifier or a transcriptional or translational activation or repression signal.
[1115] 28. The composition of numbered paragraph 27, wherein the functional domain modifies transcription or translation of the target locus.
[1116] 29. The composition of any one of numbered paragraphs 23 to 28, wherein the C2c2 effector protein comprises at least one or more nuclear localization signals.
[1117] 30. The composition of numbered paragraph 23, wherein the target locus of interest is comprised in a nucleic acid molecule in vitro.
[1118] 31. The composition of numbered paragraph 23, wherein the target locus of interest is comprised in a nucleic acid molecule within a cell.
[1119] 32. The composition of numbered paragraph 31, wherein the cell comprises a prokaryotic cell.
[1120] 33. The composition of numbered paragraph 31, wherein the cell comprises a eukaryotic cell.
[1121] 34. The composition of any one of numbered paragraphs 23-33, wherein when in complex with the effector protein the nucleic acid component(s) is capable of effecting sequence specific binding of the complex to a target sequence of the target locus of interest.
[1122] 35. The composition of any one of numbered paragraphs 23-34, wherein the nucleic acid. component(s) comprise a dual direct repeat sequence.
[1123] 36. The composition of any one of numbered paragraphs 23-34, wherein the effector protein and nucleic acid component(s) are provided via one or more polynucleotide molecules encoding the polypeptides and/or the nucleic acid component(s), and wherein the one or more polynucleotide molecules are operably configured to express the polypeptides and/or the nucleic acid component(s).
[1124] 37. The composition of numbered paragraph 36, wherein the one or more polynucleotide molecules comprise one or more regulatory elements operably configured to express the polypeptides and/or the nucleic acid component(s), optionally wherein the one or more regulatory elements comprise a promoter(s) or inducible promotor(s).
[1125] 38. The composition of numbered paragraph 36 or 37, wherein the one or more polynucleotide molecules are comprised within one or more vectors.
[1126] 39. The composition of numbered paragraph 36 or 37, wherein the one or more polynucleotide molecules are comprised within one vector.
[1127] 40. The composition of numbered paragraph 38 or 39, wherein the one or more vectors comprise viral vectors.
[1128] 41. The composition of numbered paragraph 40, wherein the one or more viral vectors comprise one or more retroviral, lentiviral, adenoviral, adeno-associated or herpes simplex viral vectors.
[1129] 42. The composition of any one of numbered paragraphs 36 to 37 wherein the one or more polynucleotide molecules are comprised in a delivery system, or the composition of numbered paragraph 38 or 39 wherein the one or more vectors are comprised in a delivery system, or the composition of any one of numbered paragraphs 23-35 wherein the assembled complex are comprised in a delivery system.
[1130] 43. The composition of any one of the preceding numbered paragraphs, wherein the non-naturally occurring or engineered composition is delivered via a delivery vehicle comprising liposome(s), particle(s), exosome(s), microvesicle(s), a gene-gun or one or more viral vector(s).
[1131] 44. A vector system comprising one or more vectors, the one or more vectors comprising one or more polynucleotide molecules encoding components of a non-naturally occurring or engineered composition which is a composition having the characteristics as defined in any one of the preceding numbered paragraphs.
[1132] 45. A delivery system configured to deliver a C2c2 effector protein and one or more nucleic acid components of a non-naturally occurring or engineered composition which is a composition having the characteristics as defined in any one of the preceding numbered paragraphs.
[1133] 46. The delivery system of numbered paragraph 45, which comprises one or more vectors or one or more polynucleotide molecules, the one or more vectors or polynucleotide molecules comprising one or more polynucleotide molecules encoding the C2c2 effector protein and one or more nucleic acid components of the non-naturally occurring or engineered composition having the characteristics as defined in any one of the preceding numbered paragraphs.
[1134] 47. The non-naturally occurring or engineered composition, vector system, or delivery system of any of the preceding or subsequent numbered paragraphs for use in a therapeutic method of treatment.
[1135] 48. A cell modified according to the method, or engineered to comprise or express, optionally inducibly or constituently, the composition or a component thereof of any one of the preceding or subsequent numbered paragraphs.
[1136] 49. The cell according to numbered paragraph 48, wherein the modification results in:
   [1137] the cell comprising altered transcription or translation of at least one RNA product;
   [1138] the cell comprising altered transcription or translation of at least one RNA product, wherein the expression of the at least one product is increased; or
   [1139] the cell comprising altered transcription or translation of at least one RNA product, wherein the expression of the at least one product is decreased.
[1140] 50. The cell of numbered paragraph 49, wherein the cell comprises a eukaryotic cell.
[1141] 51. The cell according to any one of numbered paragraph 48 or 49, wherein the comprises a mammalian cell.
[1142] 52. The cell of numbered paragraph 48 wherein the cell comprises a prokaryotic cell.
[1143] 53. The non-naturally occurring or engineered composition, vector system, or delivery system of any preceding claim, for use in
   [1144] RNA sequence specific interference,
   [1145] RNA sequence specific gene regulation,
   [1146] screening of RNA or RNA products or lineRNA or non-coding RNA, or nuclear RNA, or mRNA,
   [1147] mutagenesis,
   [1148] Fluorescence in situ hybridization,
   [1149] breeding,
   [1150] in vitro or in vivo induction of cell dormancy,
   [1151] in vitro or in vivo induction of cell cycle arrest,
   [1152] in vitro or in vivo reduction of cell growth and/or cell proliferation,
   [1153] in vitro or in vivo induction of cell anergy,
   [1154] in vitro or in vivo induction of cell apoptosis,
   [1155] in vitro or in vivo induction of cell necrosis,
   [1156] in vitro or in vivo induction of cell death, or
   [1157] in vitro or in vivo induction of programmed cell death.
[1158] 54. A cell line of or comprising the cell according to any one of numbered paragraphs 48-52, or progeny thereof.
[1159] 55. A multicellular organism comprising one or more cells according to numbered paragraph 50 or 51.
[1160] 56. A plant or animal model comprising one or more cells according to any one of numbered paragraphs 48-51; said cell(s) optionally inducibly or constituently expressing the composition or a component thereof of any one of the preceding numbered paragraphs.
[1161] 57. A product from a cell of any one of numbered paragraphs, or cell line or the organism of claim or the plant or animal model of any of numbered paragraphs 47-52, 54-56; said cell or cell(s) of the cell line or organism or plant or animal model optionally inducibly or constituently expressing the composition or a component thereof of any one of the preceding numbered. paragraphs.
[1162] 58. The product of numbered paragraph 57, wherein the amount of product is greater than or less than the amount of product from a cell that has not had alteration or modification by a method or composition of any of the preceding numbered paragraphs.
[1163] 59. The product of numbered paragraph 57, wherein the product is altered in comparison with the product from a cell that has not had alteration or modification by a method or composition of any of the preceding numbered paragraphs.
[1164] 60. An assay, screening method or mutagenesis method comprising a system or method or cells of any one of the preceding or subsequent numbered paragraphs.
[1165] 61. In an RNA-based assay, screening method or mutagenesis method wherein the improvement comprises, instead of using RNA, the method comprises using a composition as in any of the preceding numbered paragraphs.
[1166] 62. The method of numbered paragraph 61 wherein the RNA-based assay, screening method or mutagenesis method is an RNAi or Fluorescence in situ hybridization method.
[1167] 63. Use of the non-naturally occurring or engineered composition, vector system, or delivery system of any preceding numbered paragraph for:
   [1168] RNA sequence specific interference,
   [1169] RNA sequence specific gene regulation,
   [1170] screening of RNA or RNA products or lineRNA or non-coding RNA, or nuclear RNA, or mRNA,
   [1171] mutagenesis,
   [1172] Fluorescence in situ hybridization,
   [1173] breeding,
   [1174] in vitro or in vivo induction of cell dormancy,
   [1175] in vitro or in vivo induction of cell cycle arrest,
   [1176] in vitro or in vivo reduction of cell growth and/or cell proliferation,
   [1177] in vitro or in vivo induction of cell anergy,
   [1178] in vitro or in vivo induction of cell apoptosis,
   [1179] in vitro or in vivo incuction of cell necrosis,
   [1180] in vitro or in vivo induction of cell death, or
   [1181] in vitro or in vivo induction of programmed cell death.
[1182] 64. The method according to any of numbered paragraphs 1 to 21, wherein said method results in:
   [1183] RNA sequence specific interference,
   [1184] RNA sequence specific gene regulation,
   [1185] screening of RNA or RNA products or lincRNA or non-coding RNA, or nuclear RNA, or mRNA,
   [1186] mutagenesis,
   [1187] Fluorescence in situ hybridization,
   [1188] breeding,
   [1189] in vitro or in vivo induction of cell dormancy,
   [1190] in vitro or in vivo induction of cell cycle arrest,
   [1191] in vitro or in vivo reduction of cell growth and/or cell proliferation,
   [1192] in vitro or in vivo induction of cell anergy,
   [1193] in vitro or in vivo induction of cell apoptosis,
   [1194] in vitro or in vivo incuction of cell necrosis,
   [1195] in vitro or in vivo induction of cell death, or
   [1196] in vitro or in vivo induction of programmed cell death.
[1197] 65. A method for:
   [1198] RNA sequence specific interference,
   [1199] RNA sequence specific gene regulation,
   [1200] screening of RNA or RNA products or lineRNA or non-coding RNA, or nuclear RNA, or mRNA,
   [1201] mutagenesi s,
   [1202] Fluorescence in situ hybridization,
   [1203] breeding,
   [1204] in vitro or in vivo induction of cell dormancy,
   [1205] in vitro or in vivo induction of cell cycle arrest,
   [1206] in vitro or in vivo reduction of cell growth and/or cell proliferation,
   [1207] in vitro or in vivo induction of cell anergy,
   [1208] in vitro or in vivo induction of cell apoptosis,
   [1209] in vitro or in vivo incuction of cell necrosis,
   [1210] in vitro or in vivo induction of cell death, or
   [1211] in vitro or in vivo induction of programmed cell death comprising introducing or inducing in vitro or in vivo in a target cell the non-naturally occurring or engineered composition, vector system, or delivery system of any preceding numbered paragraph.
[1212] 66. An engineered, non-naturally occurring CRISPR-Cas system comprising one or more vectors comprising:

[1213] a) a first regulatory element operable in a eukaryotic or prokaryotic cell operably linked to at least one nucleotide sequence encoding a CRISPR-Cas system guide RNA that hybridizes with a target sequence of an RNA molecule encoded by a DNA molecule in a eukaryotic or prokaryotic cell, wherein the DNA molecule encodes and the eukaryotic or prokaryotic cell expresses at least one gene product, and

[1214] b) a second regulatory element operable in a eukaryotic or prokaryotic cell operably linked to a nucleotide sequence encoding a Type-II C2c2 effector protein, wherein components (a) and (b) are located on same or different vectors of the system,

[1215] whereby the guide RNA targets and hybridizes with the target sequence and the C2c2 effector protein cleaves the RNA molecule,

[1216] whereby expression of the at least one gene product is altered; and, wherein the C2c2 effector protein and the guide RNA do not naturally occur together.
[1217] 67. An engineered, non-naturally occurring composition comprising a CRISPR-Cas system, said system comprising a functional CRISPR C2c2 effector protein and guide RNA (gRNA);

[1218] wherein the gRNA comprises a dead guide sequence;

[1219] whereby the gRNA is capable of hybridizing to a target sequence;

[1220] whereby the CRISPR-Cas system is directed to the target sequence with reduced indel activity resultant from nuclease activity of a non-mutant C2c2 effector protein of the system.
[1221] 68. A method of inhibiting cell growth, the method comprising delivering to the cell a non-naturally occuring or engineered composition comprising a functional CRISPR C2c2 effector protein and guide RNA (gRNA);

[1222] whereby the gRNA. is capable of hybridizing to a target RNA sequence of the cell;

[1223] whereby the CRISPR-Cas system is directed to the target RNA sequence with reduced indel activity resultant from nuclease activity of a non-mutant C2c2 effector protein of the system.
[1224] 69. A CRISPR associated Cas vector system comprising one or more vectors comprising:

[1225] a) a first regulatory element operable in a eukaryotic or prokaryotic cell operably linked to at least one nucleotide sequence encoding a CRISPR-Cas system guide RNA that hybridizes with a target sequence of an RNA molecule encoded by a DNA molecule in a eukaryotic or prokaryotic cell, wherein the DNA molecule encodes and the eukaryotic or prokaryotic cell expresses at least one gene product, and

[1226] b) a second regulatory element operable in a eukaryotic or prokaryotic cell operably linked to a nucleotide sequence encoding a Type-II C2c2 effector protein., wherein components (a) and (h) are located on same or different vectors of the system,

[1227] whereby the guide RNA targets and hybridizes with the target sequence and the C2c2 effector protein cleaves the RNA molecule,

[1228] whereby expression of the at least one gene product is altered; and, wherein the C2c2 effector protein and the guide RNA do not naturally occur together.

[1229] While preferred embodiments of the present invention have been shown and described herein, it will be obvious to those skilled in the art that such embodiments are provided by way of example only. Numerous variations, changes, and substitutions will now occur to those skilled in the art without departing from the invention. It should be understood that various alternatives to the embodiments of the invention described herein may be employed in practicing the invention. It is intended that the following claims define the scope of the invention and that methods and structures within the scope of these claims and their equivalents be covered thereby.

What is claimed:

1. A. A method of modifying a target locus of interest, the method comprising delivering to said locus a non-naturally occurring or engineered composition comprising a Class 2 type VI CRISPR-Cas effector protein and one or more engineered nucleic acid components, wherein the effector protein forms a complex with the one or more nucleic acid components, the one or more nucleic acid components directs the complex to an RNA target locus of interest and. the complex binds to the target locus of interest, or
B. A non-naturally occurring or engineered composition comprising a Class 2 type VI CRISPR-Cas effector protein and one or more engineered nucleic acid components, wherein the effector protein forms a complex with the one or more nucleic acid components, the one or more nucleic acid components directs the complex to an RNA target locus of interest and the complex binds to the target locus of interest.

2. The method or composition of claim 1, wherein:
a. the effector protein comprises a C2c2 effector protein and/or
b. the target locus of interest is provided via a nucleic acid molecule hi vitro and/or
c. the target locus of interest is provided via a nucleic acid molecule within a cell and/or
d. the target locus of interest is provided via a nucleic acid molecule within a cell wherein the cell comprises a prokaryotic cell and/or
e. the target locus of interest is provided via a nucleic acid molecule within a cell wherein the cell comprises a eukaryotic cell and/or
f. the modification of the target locus of interest comprises a nucleotide strand break and/or
g. the effector protein is expressed from a nucleic acid molecule codon optimized for expression in eukaryotic cell and/or
h. the effector protein is associated with one or more functional domains and/or
i. the effector protein contains one or more mutations within an HEPN Domain
j. the effector protein contains one or more mutations comprising as R597A, H602A, R1278A, and/or H1283A and/or
k. the complex delivers an epigenentic modifier or a transcriptional or translational activation or repression signal and/or
l. the complex delivers a functional domain that modifies transcription or translation of the target locus and/or
m. the effector protein comprises at least one or more nuclear localization signals and/or
n. when in complex with the effector protein the nucleic acid component(s) is capable of effecting sequence specific binding of the complex to a target sequence of the target locus of interest and/or
o. the nucleic acid component(s) comprise a dual direct repeat sequence and/or
p. the effector protein and nucleic acid component(s) are provided via one or more polynucleotide molecules encoding the polypeptides and/or the nucleic acid component(s), and wherein the one or more polynucleotide molecules are operably configured to express the polypeptides and/or the nucleic acid component(s) and/or
q. the effector protein and nucleic acid component(s) are provided via one or more polynucleotide molecules encoding the polypeptides and/or the nucleic acid component(s), and wherein the one or more polynucleotide molecules are operably configured to express the polypeptides and/or the nucleic acid component(s) and the one or more polynucleotide molecules comprise one or more regulatory elements operably configured to express the polypeptides and/or the nucleic acid component(s), optionally wherein the one or more regulatory elements comprise a promoter(s) or inducible promotor(s) and/or
r. the effector protein and nucleic acid component(s) are provided via one or more polynucleotide molecules encoding the polypeptides and/or the nucleic acid component(s), and wherein the one or more polynucleotide molecules are operably configured to express the polypeptides and/or the nucleic acid component(s) and the one or more polynucleotide molecules are comprised within one or more vector(s) and/or
s. the effector protein and nucleic acid component(s) are provided via one or more polynucleotide molecules encoding the polypeptides and/or the nucleic acid component(s), and wherein the one or more polynucleotide molecules are operably configured to express the polypeptides and/or the nucleic acid component(s) and the one or more polynucleotide molecules are comprised within one vector and/or
t. the effector protein and nucleic acid component(s) are provided via one or more polynucleotide molecules encoding the polypeptides and/or the nucleic acid component(s), and wherein the one or more polynucleotide molecules are operably configured to express the polypeptides and/or the nucleic acid component(s) and the one or more polynucleotide molecules are comprised within one or more or one vector and the one or more vectors comprise viral vector(s) and/or
u. the effector protein and nucleic acid component(s) are provided via one or more polynucleotide molecules encoding the polypeptides and/or the nucleic acid component(s), and wherein the one or more polynucleotide molecules are operably configured to express the polypeptides and/or the nucleic acid component(s) and the one or more polynucleotide molecules are comprised within one or more or one vector and the one or more vectors comprise viral vector(s) and the one or more viral vector(s) comprise one or more retroviral, lentiviral, adenoviral, adeno-associated or herpes simplex viral vector(s) and/or
v. the effector protein and nucleic acid component(s) are provided via one or more polynucleotide molecules encoding the polypeptides and/or the nucleic acid component(s), and wherein the one or more polynucleotide molecules are operably configured to express the polypeptides and/or the nucleic acid component(s) and are comprised in a delivery system or the complex or its components or a component of the complex is comprised in a delivery system and/or
w. the non-naturally occurring or engineered composition is delivered via a delivery vehicle comprising liposome(s), particle(s), exosome(s), microvesicle(s), a gene-gun or one or more viral vector(s) and/or
x. the one or more polynucleotide molecules comprise one or more regulatory elements operably configured to express the polypeptides and/or the nucleic acid component(s), and the one or more regulatory elements comprise a promoter(s) or inducible promotor(s).

3. A vector system comprising one or more vectors, the one or more vectors comprising one or more polynucleotide molecules encoding components of a non-naturally occurring or engineered composition of claim 1.

4. A vector system comprising one or more vectors, the one or more vectors comprising one or more polynucleotide molecules encoding components of a non-naturally occurring or engineered composition of claim 2.

5. A delivery system configured to deliver an effector protein and one or more nucleic acid components of a non-naturally occurring or engineered composition of claim 1.

6. A delivery system configured to deliver an effector protein and one or more nucleic acid components of a non-naturally occurring or engineered composition of claim 2.

7. A method of treatment comprising performing a method or administering a composition of claim 1.

8. A cell modified according to the method of, or engineered to comprise or express, optionally inducibly or constitutively, the composition of claim 1 or a component thereof.

9. The cell according to claim 8, wherein the modification results in:
the cell comprising altered transcription or translation of at least one RNA product;
the cell comprising altered transcription or translation of at least one RNA product, herein the expression of the at least one product is increased; or
the cell comprising altered transcription or translation of at least one RNA product, wherein the expression of the at least one product is decreased.

10. The cell of claim 9, wherein the cell comprises a eukaryotic cell, or a mammalian cell, or a prokaryotic cell.

11. The non-naturally occurring or engineered composition of, or a vector system that encodes the composition of, or delivery system that delivers the composition of, or the method of claim 1 for:
RNA sequence specific interference,
RNA sequence specific gene regulation,
screening of RNA or RNA products or lineRNA or non-coding RNA, or nuclear RNA, or mRNA,
mutagenesis,
Fluorescence in situ hybridization,
breeding,
in vitro or in vivo induction of cell dormancy,
in vitro or in vivo induction of cell cycle arrest,
in vitro or in vivo reduction of cell growth and/or cell proliferation,
in vitro or in ⁻vivo induction of cell anergy,
in vitro or in vivo induction of cell apoptosis,
in vitro or in vivo incuction of cell necrosis,
in vitro or in vivo induction of cell death, or
in vitro or in vivo induction of progra.mmed cell death.

12. A cell line of or comprising, or multicellular organism comprising, or a plant or animal model comprising, or a product from, or an assay, screening method or mutagenesis method comprising, the cell according of claim 8 or progeny thereof.

13. The product of claim 12, wherein the amount of product is greater than or less than the amount of product from a cell that has not had alteration or modification by a method or composition of any of the preceding claims or the product is altered in comparison with the product from a cell that has not had alteration or modification by a method or composition of any of the preceding claims.

14. In an RNA-based assay, screening method or mutagenesis method wherein the improvement comprises, instead of using RNA, the method comprises using a composition as in claim 1, optionally wherein the RNA-based assay, screening method or mutagenesis method is an RNAi or Fluorescence in situ hybridization method.

15. A. An engineered, non-naturally occurring CRISPR-Cas system comprising one or more vectors comprising:
a) a first regulatory element operable in a eukaryotic or prokaryotic cell operably linked to at least one nucleotide sequence encoding a CRISPR-Cas system guide RNA that hybridizes with a target sequence of an RNA molecule encoded by a DNA molecule in a eukaryotic or prokaryotic cell, wherein the DNA molecule encodes and the eukaryotic or prokaryotic cell expresses at least one gene product, and
b) a second regulatory element operable in a eukaryotic or prokaryotic cell operably linked to a nucleotide sequence encoding a Class 2 type VI CRISPR-Cas effector protein, wherein components (a) and (b) are located on same or different vectors of the system,
whereby the guide RNA targets and hybridizes with the target sequence and the effector protein cleaves the RNA molecule,
whereby expression of the at least one gene product is altered; and, wherein the effector protein and the pide RNA do not naturally occur together, or
B. An engineered, non-naturally occurring composition comprising a CRISPR-Cas system, said system comprising a functional a Class 2 type VI CRISPR-Cas effector protein and guide RNA (gRNA);
wherein the gRNA comprises a dead guide sequence;
whereby the gRNA is capable of hybridizing to a target sequence;
whereby the CRISPR-Cas system is directed to the target sequence with reduced indel activity resultant from nuclease activity of a non-mutant effector protein of the system; or
C. A method of inhibiting cell growth, the method comprising delivering to the cell a non-naturally occuring or engineered composition comprising a functional a Class 2 type VI CRISPR-Cas effector protein and guide RNA (gRNA);
whereby the gRNA is capable of hybridizing to a target RNA sequence of the cell;
whereby the CRISPR-Cas system is directed to the target RNA sequence with reduced indel activity resultant from nuclease activity of a non-mutant effector protein of the system; or
D. A CRISPR associated Cas vector system comprising one or more vectors comprising:
a) a first regulatory element operable in a eukaryotic or prokaryotic cell operably linked to at least one nucleotide sequence encoding a CRISPR-Cas system guide RNA that hybridizes with a target sequence of an RNA molecule encoded by a DNA molecule in a eukaryotic or prokaryotic cell, wherein the DNA molecule encodes and the eukaryotic or prokaryotic cell expresses at least one gene product, and
b) a second regulatory element operable in a eukaryotic or prokaryotic cell operably linked to a nucleotide sequence encoding a a Class 2 type VI CRISPR-Cas effector protein, wherein components (a) and (b) are located on same or different vectors of the system, whereby the guide RNA targets and hybridizes with the target sequence and the effector protein cleaves the RNA molecule,
whereby expression of the at least one gene product is altered; and, wherein the effector protein and the guide RNA do not naturally occur together.

16. A system or method of claim 15 wherein the effector protein comprises a C2c2 effector protein.

17. A method for detecting a target RNA associated with a disease, comprising:
a first step comprising:
A. contacting a sample with a Class 2 Type VI CRISPR-Cas effector protein and a guide RNA, wherein the Class 2 Type VI CRISPR-Cas effector protein forms a complex with the guide RNA, and wherein the guide RNA directs the complex to bind the target RNA, or
B. contacting a sample with a Class 2 Type VI CRISPR-Cas effector protein, a guide RNA, and a non-targeted RNA, wherein the Class 2 Type VI CRISPR-Cas effector protein forms a complex with the guide RNA, and wherein the guide RNA directs the complex to bind the target RNA, and wherein binding of the guide RNA to the target RNA activates the Class 2 Type VI CRISPR-Cas effector protein for non-specific RNAse activity, and a second step comprising:
C. detecting binding of the guide RNA to the target RNA.

18. The method of claim 17, wherein the Class 2 Type VI CRISPR-Cas effector protein comprises C2c2.

19. The method of claim 18, wherein the binding of the guide RNA to the target RNA is detected by a fluorescent signal resulting from cleavage activity of C2c2.

20. The method of claim 19, wherein the cleavage activity of C2c2 comprises cleavage of a non-targeted RNA.

21. The method of claim 20, wherein binding of the guide RNA to the target RNA activates C2c2 to cleave the non-targeted RNA.

22. The method of claim 17, wherein the target RNA is endogenous or exogenous to a eukaryotic cell.

23. The method of claim 17, wherein the target RNA is associated with a virus.

24. The method of claim 17, wherein the non-targeted RNA is a ssRNA.

25. The method of claim 24, wherein the non-targeted RNA is fluorescently labeled.

26. The method of claim 25, wherein the detecting step comprises detecting a fluorescent signal resulting from the cleavage of the non-targeted RNA.

27. The method of claim 17, wherein the target RNA is associated with a disease, or with a virus, or is expressed in cancer cells, or is expressed in pathogen-infected cells.

The application's sequence listing, which the Patent Office published only in electronic form, follows.

SEQUENCE LISTING (2228 sequences)

SEQ ID NO: 1 - protein, 7 aa, Simian virus 40
PKKKRKV

SEQ ID NO: 2 - protein, 16 aa, Unknown
  source: /note="Description of Unknown: Nucleoplasmin bipartite NLS sequence"
KRPAATKKAGQAKKKK

SEQ ID NO: 3 - protein, 9 aa, Unknown
  source: /note="Description of Unknown: C-myc NLS sequence"
PAAKRVKLD

SEQ ID NO: 4 - protein, 11 aa, Unknown
  source: /note="Description of Unknown: C-myc NLS sequence"
RQRRNELKRSP

SEQ ID NO: 5 - protein, 38 aa, Homo sapiens
NQSSNFGPMKGGNFGGRSSGPYGGGGQYFAKPRNQGGY

SEQ ID NO: 6 - protein, 42 aa, Unknown
  source: /note="Description of Unknown: IBB domain from importin-alpha sequence"
RMRIZFKNKGKDTAELRRRRVEVSVELRKAKKDEQILKRRNV

SEQ ID NO: 7 - protein, 8 aa, Unknown
  source: /note="Description of Unknown: Myoma T protein sequence"
VSRKRPRP

SEQ ID NO: 8 - protein, 8 aa, Unknown
  source: /note="Description of Unknown: Myoma T protein sequence"
PPKKARED

SEQ ID NO: 9 - protein, 8 aa, Homo sapiens
PQPKKKPL

SEQ ID NO: 10 - protein, 12 aa, Mus musculus
SALIKKKKKMAP

SEQ ID NO: 11 - protein, 5 aa, Influenza virus
DRLRR

SEQ ID NO: 12 - protein, 7 aa, Influenza virus
PKQKKRK

SEQ ID NO: 13 - protein, 10 aa, Hepatitis delta virus
RKLKKKIKKL

SEQ ID NO: 14 - protein, 10 aa, Mus musculus
REKKKFLKRR

SEQ ID NO: 15 - protein, 20 aa, Homo sapiens
KRKGDEVDGVDEVAKKKSKK

SEQ ID NO: 16 - protein, 17 aa, Homo sapiens
RKCLQAGMNLEARKTKK

SEQ ID NO: 17 - protein, 4 aa, Unknown
  source: /note="Description of Unknown: 'KDEL' family motif peptide"
KDEL

SEQ ID NO: 18 - protein, 4 aa, Artificial Sequence
  source: /note="Description of Artificial Sequence: Synthetic peptide"
GGGS

SEQ ID NO: 19 - protein, 15 aa, Artificial Sequence
  source: /note="Description of Artificial Sequence: Synthetic peptide"
GGGGSGGGGSGGGGS

SEQ ID NO: 20 - protein, 30 aa, Artificial Sequence
  source: /note="Description of Artificial Sequence: Synthetic polypeptide"
GGGGSGGGGSGGGGSGGGGSGGGGSGGGGS

SEQ ID NO: 21 - protein, 45 aa, Artificial Sequence
  source: /note="Description of Artificial Sequence: Synthetic polypeptide"
GGGGSGGGGSGGGGSGGGGSGGGGSGGGGSGGGGSGGGGSGGGGS

SEQ ID NO: 22 - protein, 60 aa, Artificial Sequence
  source: /note="Description of Artificial Sequence: Synthetic polypeptide"
GGGGSGGGGSGGGGSGGGGSGGGGSGGGGSGGGGSGGGGSGGGGSGGGGSGGGGSGGGGS

SEQ ID NO: 23 - protein, 12 aa, Artificial Sequence
  source: /note="Description of Artificial Sequence: Synthetic peptide"
  MOD_RES (2)..(2): Aminohexanoyl
  MOD_RES (5)..(5): Aminohexanoyl
  MOD_RES (8)..(8): Aminohexanoyl
  MOD_RES (11)..(11): Aminohexanoyl
RXRRXRRXRRXR

SEQ ID NO: 24 - DNA, 20 bp, Homo sapiens
gagtccgagcagaagaagaa

SEQ ID NO: 25 - DNA, 20 bp, Homo sapiens
gagtcctagcaggagaagaa

SEQ ID NO: 26 - DNA, 20 bp, Homo sapiens
gagtctaagcagaagaagaa

SEQ ID NO: 27 - RNA, 36 nt, Artificial Sequence
  source: /note="Description of Artificial Sequence: Synthetic oligonucleotide"
gccgcagcgaaugccguuucacgaaucgucaggcgg

SEQ ID NO: 28 - RNA, 75 nt, Artificial Sequence
  source: /note="Description of Artificial Sequence: Synthetic oligonucleotide"
gcuggagacguuuuuugaaacggcgagugcugcggauagcgaguuucucuuggggaggcgcucgcggccacuuuu

SEQ ID NO: 29 - protein, 1388 aa, Unknown
  source: /note="Description of Unknown: Opitutaceae bacterium sequence"
MSLNRIYQGRVAAVETGTALAKGNVEWMPAAGGDEVLWQHHELFQAAINYYLVALLALADKNNPVLGPLISQMDNPQSPYHVWGSFRRQGRQRTGLSQAVAPYITPGNNAPTLDEVFRSILAGNPTDRATLDAALMQLLKACDGAGAIQQEGRSYWPKFCDPDSTANFAGDPAMLRREQHRLLLPQVLHDPAITHDSPALGSFDTYSIATPDTRTPQLTGPKARARLEQAITLWRVRLPESAADFDRLASSLKKIPDDDSRLNLQGYVGSSAKGEVQARLFALLLFRHLERSSFTLGLLRSATPPPKNAETPPPAGVPLPAASAADPVRIARGKRSFVFRAFTSLPCWHGGDNIHPTWKSFDIAAFKYALTVINQIEEKTKERQKECAELETDFDYMHGRLAKIPVKYTTGEAEPPPILANDLRIPLLRELLQNIKVDTALTDGEAVSYGLQRRTIRGFRELRRIWRGHAPAGTVFSSELKEKLAGELRQFQTDNSTTIGSVQLFNELIQNPKYWPIWQAPDVETARQWADAGFADDPLAALVQEAELQEDIDALKAPVKLTPADPEYSRRQYDFNAVSKFGAGSRSANRHEPGQTERGHNTFTTEIAARNAADGNRWRATHVRIHYSAPRLLRDGLRRPDTDGNEALEAVPWLQPMMEALAPLPTLPQDLTGMPVFLMPDVTLSGERRILLNLPVTLEPAALVEQLGNAGRWQNQFFGSREDPFALRWPADGAVKTAKGKTHIPWHQDRDHFTVLGVDLGTRDAGALALLNVTAQKPAKPVHRIIGEADGRTWYASLADARMIRLPGEDARLFVRGKLVQEPYGERGRNASLLEWEDARNIILRLGQNPDELLGADPRRHSYPEINDKLLVALRRAQARLARLQNRSWRLRDLAESDKALDEIHAERAGEKPSPLPPLARDDAIKSTDEALLSQRDIIRRSFVQIANLILPLRGRRWEWRPHVEVPDCHILAQSDPGTDDTKRLVAGQRGISHERIEQIEELRRRCQSLNRALRHKPGERPVLGRPAKGEEIADPCPALLEKINRLRDQRVDQTAHAILAAALGVRLRAPSKDRAERRHRDIHGEYERFRAPADFVVIENLSRYLSSQDRARSENTRLMQWCHRQIVQKLRQLCETYGIPVLAVPAAYSSRFSSRDGSAGFRAVHLTPDHRHRMPWSRILARLKAHEEDGKRLEKTVLDEARAVRGLFDRLDRFNAGHVPGKPWRTLLAPLPGGPVFVPLGDATPMQADLNAAINIALRGIAAPDRHDIHHRLRAENKKRILSLRLGTQREKARWPGGAPAVTLSTPNNGASPEDSDALPERVSNLFVDIAGVANFERVTIEGVSQKFATGRGLWASVKQRAWNRVARLNETVTDNNRNEEEDDIPM

SEQ ID NO: 30 - RNA, 36 nt, Artificial Sequence
  source: /note="Description of Artificial Sequence: Synthetic oligonucleotide"
guccaagaaaaaagaaaugauacgaggcauuagcac

SEQ ID NO: 31 - RNA, 107 nt, Artificial Sequence
  source: /note="Description of Artificial Sequence: Synthetic polynucleotide"
cuggacgaugucucuuuuauuucuuuuuucuuggaucugaguacgagcacccacauuggacauuucgcauggugggugcucguacuauagguaaaacaaaccuuuuu

SEQ ID NO: 32 - protein, 1108 aa, Bacillus thermoamylovorans
MATRSFILKIEPNEEVKKGLWKTHEVLNHGIAYYMNILKLIRQEAIYEHHEQDPKNPKKVSKAEIQAELWDFVLKMQKCNSFTHEVDKDVVFNILRELYEELVPSSVEKKGEANQLSNKFLYPLVDPNSQSGKGTASSGRKPRWYNLKIAGDPSWEEEKKKWEEDKKKDPLAKILGKLAEYGLIPLFIPFTDSNEPIVKEIKWMEKSRNQSVRRLDKDMFIQALERFLSWESWNLKVKEEYEKVEKEHKTLEERIKEDIQAFKSLEQYEKERQEQLLRDTLNTNEYRLSKRGLRGWREIIQKWLKMDENEPSEKYLEVFKDYQRKHPREAGDYSVYEFLSKKENHFIWRNHPEYPYLYATFCEIDKKKKDAKQQATFTLADPINHPLWVRFEERSGSNLNKYRILTEQLHTEKLKKKLTVQLDRLIYPTESGGWEEKGKVDIVLLPSRQFYNQIFLDIEEKGKHAFTYKDESIKFPLKGTLGGARVQFDRDHLRRYPHKVESGNVGRIYFNMTVNIEPTESPVSKSLKIHRDDFPKFVNFKPKELTEWIKDSKGKKLKSGIESLEIGLRVMSIDLGQRQAAAASIFEVVDQKPDIEGKLFFPIKGTELYAVHRASFNIKLPGETLVKSREVLRKAREDNLKLMNQKLNFLRNVLHFQQFEDITEREKRVTKWISRQENSDVPLVYQDELIQIRELMYKPYKDWVAFLKQLHKRLEVEIGKEVKHWRKSLSDGRKGLYGISLKNIDEIDRTRKFLLRWSLRPTEPGEVRRLEPGQRFAIDQLNHLNALKEDRLKKMANTIIMHALGYCYDVRKKKWQAKNPACQIILFEDLSNYNPYEERSRFENSKLMKWSRREIPRQVALQGEIYGLQVGEVGAQFSSRFHAKTGSPGIRCSVVTKEKLQDNRFFKNLQREGRLTLDKIAVLKEGDLYPDKGGEKFISLSKDRKLVTTHADINAAQNLQKRFWTRTHGFYKVYCKAYQVDGQTVYIPESKDQKQKIIEEFGEGYFILKDGVYEWGNAGKLKIKKGSSKQSSSELVDSDILKDSFDLASELKGEKLMLYRDPSGNVFPSDKWMAAGVFFGKLERILISKLTNQYSISTIEDDSSKQSM

SEQ ID NO: 33 - RNA, 36 nt, Artificial Sequence
  source: /note="Description of Artificial Sequence: Synthetic oligonucleotide"
guucgaaagcuuaguggaaagcuucgugguuagcac

SEQ ID NO: 34 - RNA, 69 nt, Artificial Sequence
  source: /note="Description of Artificial Sequence: Synthetic oligonucleotide"
cacggauaaucacgacuuuccacuaagcuuucgaauuuuaugaugcgagcauccucucaggucaaaaaa

SEQ ID NO: 35 - protein, 1108 aa, Bacillus sp.
MAIRSIKLKLKTHTGPEAQNLRKGIWRTHRLLNEGVAYYMKMLLLFRQESTGERPKEELQEELICHIREQQQRNQADKNTQALPLDKALEALRQLYELLVPSSVGQSGDAQIISRKFLSPLVDPNSEGGKGTSKAGAKPTWQKKKEANDPTWEQDYEKWKKRREEDPTASVITTLEEYGIRPIFPLYTNTVTDIAWLPLQSNQFVRTWDRDMLQQAIERLLSWESWNKRVQEEYAKLKEKMAQLNEQLEGGQEWISLLEQYEENRERELRENMTAANDKYRITKRQMKGWNELYELWSTFPASASHEQYKEALKRVQQRLRGRFGDAHFFQYLMEEKNRLIWKGNPQRIHYFVARNELTKRLEEAKQSATMTLPNARKHPLWVRFDARGGNLQDYYLTAEADKPRSRRFVTFSQLIWPSESGWMEKKDVEVELALSRQFYQQVKLLKNDKGKQKIEFKDKGSGSTFNGHLGGAKLQLERGDLEKEEKNFEDGEIGSVYLNVVIDFEPLQEVKNGRVQAPYGQVLQLIRRPNEFPKVTTYKSEQLVEWIKASPQHSAGVESLASGFRVMSIDLGLRAAAATSIFSVEESSDKNAADFSYWIEGTPLVAVHQRSYMLRLPGEQVEKQVMEKRDERFQLHQRVKFQIRVLAQIMRMANKQYGDRWDELDSLKQAVEQKKSPLDQTDRTFWEGIVCDLTKVLPRNEADWEQAVVQIHRKAEEYVGKAVQAWRKRFAADERKGIAGLSMWNIEELEGLRKLLISWSRRTRNPQEVNRFERGHTSHQRLLTHIQNVKEDRLKQLSHAIVMTALGYVYDERKQEWCAEYPACQVILFENLSQYRSNLDRSTKENSTLMKWAHRSIPKYVHMQAEPYGIQIGDVRAEYSSRFYAKTGTPGIRCKKVRGQDLQGRRFENLQKRLVNEQFLTEEQVKQLRPGDIVPDDSGELFMTLTDGSGSKEVVFLQADINAAHNLQKRFWQRYNELFKVSCRVIVRDEEEYLVPKTKSVQAKLGKGLFVKKSDTAWKDVYVWDSQAKLKGKTTFTEESESPEQLEDFQEIIEEAEEAKGTYRTLFRDPSGVFFPESVWYPQKDFWGEVKRKLYGKLRERFLTKAR

SEQ ID NO: 36 - RNA, 35 nt, Artificial Sequence
  source: /note="Description of Artificial Sequence: Synthetic oligonucleotide"
guuuugagaauagcccgacauagagggcaauagac

SEQ ID NO: 37 - RNA, 36 nt, Artificial Sequence
  source: /note="Description of Artificial Sequence: Synthetic oligonucleotide"
guuaugaaaacagcccgacauagagggcaauagaca

SEQ ID NO: 38 - protein, 1334 aa, Unknown
  source: /note="Description of Unknown: Lachnospiraceae bacterium sequence"
MKISKVDHTRMAVAKGNQHRRDEISGILYKDPTKTGSIDFDERFKKLNCSAKILYHVFNGIAEGSNKYKNIVDKVNNNLDRVLFTGKSYDRKSIIDIDTVLRNVEKINAFDRISTEEREQIIDDLLEIQLRKGLRKGKAGLREVLLIGAGVIVRTDKKQEIADFLEILDEDFNKTNQAKNIKLSIENQGLVVSPVSRGEERIFDVSGAQKGKSSKKAQEKEALSAFLLDYADLDKNVRFEYLRKIRRLINLYFYVKNDDVMSLTEIPAEVNLEKDFDIWRDHEQRKEENGDFVGCPDILLADRDVKKSNSKQVKIAERQLRESIREKNIKRYRFSIKTIEKDDGTYFFANKQISVFWIHRIENAVERILGSINDKKLYRLRLGYLGEKVWKDILNFLSIKYIAVGKAVFNFAMDDLQEKDRDIEPGKISENAVNGLTSFDYEQIKADEMLQREVAVNVAFAANNLARVTVDIPQNGEKEDILLWNKSDIKKYKKNSKKGILKSILQFFGGASTWNMKMFEIAYHDQPGDYEENYLYDIIQIIYSLRNKSFHFKTYDHGDKNWNRELIGKMIEHDAERVISVEREKFHSNNLPMFYKDADLKKILDLLYSDYAGRASQVPAFNTVLVRKNFPEFLRKDMGYKVHFNNPEVENQWHSAVYYLYKEIYYNLFLRDKEVKNLFYTSLKNIRSEVSDKKQKLASDDFASRCEEIEDRSLPEICQIIMTEYNAQNFGNRKVKSQRVIEKNKDIFRHYKMLLIKTLAGAFSLYLKQERFAFIGKATPIPYETTDVKNFLPEWKSGMYASFVEEIKNNLDLQEWYIVGRFLNGRMLNQLAGSLRSYIQYAEDIERRAAENRNKLFSKPDEKIEACKKAVRVLDLCIKISTRISAEFTDYFDSEDDYADYLEKYLKYQDDAIKELSGSSYAALDHFCNKDDLKFDIYVNAGQKPILQRNIVMAKLFGPDNILSEVMEKVTESAIREYYDYLKKVSGYRVRGKCSTEKEQEDLLKFQRLKNAVEFRDVTEYAEVINELLGQLISWSYLRERDLLYFQLGFHYMCLKNKSFKPAEYVDIRRNNGTIIHNAILYQIVSMYINGLDFYSCDKEGKTLKPIETGKGVGSKIGQFIKYSQYLYNDPSYKLEIYNAGLEVFENIDEHDNITDLRKYVDHFKYYAYGNKMSLLDLYSEFFDRFFTYDMKYQKNVVNVLENILLRHFVIFYPKFGSGKKDVGIRDCKKERAQIEISEQSLTSEDFMFKLDDKAGEEAKKFPARDERYLQTIAKLLYYPNEIEDMNRFMKKGETINKKVQFNRKKKITRKQKNNSSNEVLSSTMGYLFKNIKL

SEQ ID NO: 39 - RNA, 36 nt, Artificial Sequence
  source: /note="Description of Artificial Sequence: Synthetic oligonucleotide"
guuuuaguccucuuucauauagagguagucucuuac

SEQ ID NO: 40 - RNA, 99 nt, Artificial Sequence
  source: /note="Description of Artificial Sequence: Synthetic oligonucleotide"
augaaaagaggacuaaaacugaaagaggacuaaaacaccagauguggauaacuauauuaguggcuauuaaaaauucgucgauauuagagaggaaacuuu

SEQ ID NO: 41 - protein, 1120 aa, Listeria seeligeri
MWISIKTLIHHLGVLFFCDYMYNRREKKIIEVKTMRITKVEVDRKKVLISRDKNGGKLVYENEMQDNTEQIMHHKKSSFYKSVVNKTICRPEQKQMKKLVHGLLQENSQEKIKVSDVTKLNISNFLNHRFKKSLYYFPENSPDKSEEYRIEINLSQLLEDSLKKQQGTFICWESFSKDMELYINWAENYISSKTKLIKKSIRNNRIQSTESRSGQLMDRYMKDILNKNKPFDIQSVSEKYQLEKLTSALKATFKEAKKNDKEINYKLKSTLQNHERQIIEELKENSELNQFNIEIRKHLETYFPIKKTNRKVGDIRNLEIGEIQKIVNHRLKNKIVQRILQEGKLASYEIESTVNSNSLQKIKIEEAFALKFINACLFASNNLRNMVYPVCKKDILMIGEFKNSFKEIKHKKFIRQWSQFFSQEITVDDIELASWGLRGAIAPIRNEIIHLKKHSWKKFFNNPTFKVKKSKIINGKTKDVTSEFLYKETLFKDYFYSELDSVPELIINKMESSKILDYYSSDQLNQVFTIPNFELSLLTSAVPFAPSFKRVYLKGFDYQNQDEAQPDYNLKLNIYNEKAFNSEAFQAQYSLFKMVYYQVFLPQFTTNNDLFKSSVDFILTLNKERKGYAKAFQDIRKMNKDEKPSEYMSYIQSQLMLYQKKQEEKEKINHFEKFINQVFIKGFNSFIEKNRLTYICHPTKNTVPENDNIEIPFHTDMDDSNIAFWLMCKLLDAKQLSELRNEMIKFSCSLQSTEEISTFTKAREVIGLALLNGEKGCNDWKELFDDKEAWKKNMSLYVSEELLQSLPYTQEDGQTPVINRSIDLVKKYGTETILEKLFSSSDDYKVSAKDIAKLHEYDVTEKIAQQESLHKQWIEKPGLARDSAWTKKYQNVINDISNYQWAKTKVELTQVRHLHQLTIDLLSRLAGYMSIADRDFQFSSNYILERENSEYRVTSWILLSENKNKNKYNDYELYNLKNASIKVSSKNDPQLKVDLKQLRLTLEYLELFDNRLKEKRNNISHFNYLNGQLGNSILELFDDARDVLSYDRKLKNAVSKSLKEILSSHGMEVTFKPLYQTNHHLKIDKLQPKKIHHLGEKSTVSSNQVSNEYCQLVRTLLTMK

SEQ ID NO: 42 - RNA, 36 nt, Artificial Sequence
  source: /note="Description of Artificial Sequence: Synthetic oligonucleotide"
guuuuaguccccuucguuuuugggguagucuaaauc

SEQ ID NO: 43 - RNA, 113 nt, Artificial Sequence
  source: /note="Description of Artificial Sequence: Synthetic polynucleotide"
gauuuagagcaccccaaaaguaaugaaaauuugcaauuaaauaaggaauauuaaaaaaaugugauuuuaaaaaaauugaagaaauuaaaugaaaaauuguccaaguaaaaaaa

SEQ ID NO: 44 - RNA, 70 nt, Artificial Sequence
  source: /note="Description of Artificial Sequence: Synthetic oligonucleotide"
auuuagauuaccccuuuaauuuauuuuaccauauuuuucucauaaugcaaacuaauauuccaaaauuuuu

SEQ ID NO: 45 - protein, 1389 aa, Leptotrichia wadei
MGNLFGHKRWYEVRDKKDFKIKRKVKVKRNYDGNKYILNINENNNKEKIDNNKFIRKYINYKKNDNILKEFTRKFHAGNILFKLKGKEGIIRIENNDDFLETEEVVLYIEAYGKSEKLKALGITKKKIIDEAIRQGITKDDKKIEIKRQENEEEIEIDIRDEYTNKTLNDCSIILRIIENDELETKKSIYEIFKNINMSLYKIIEKIIENETEKVFENRYYEEHLREKLLKDDKIDVILTNFMEIREKIKSNLEILGFVKFYLNVGGDKKKSKNKKMLVEKILNINVDLTVEDIADFVIKELEFWNITKRIEKVKKVNNEFLEKRRNRTYIKSYVLLDKHEKFKIERENKKDKIVKFFVENIKNNSIKEKIEKILAEFKIDELIKKLEKELKKGNCDTEIFGIFKKHYKVNFDSKKFSKKSDEEKELYKIIYRYLKGRIEKILVNEQKVRLKKMEKIEIEKILNESILSEKILKRVKQYTLEHIMYLGKLRHNDIDMTTVNTDDFSRLHAKEELDLELITFFASTNMELNKIFSRENINNDENIDFFGGDREKNYVLDKKILNSKIKIIRDLDFIDNKNNITNNFIRKFTKIGTNERNRILHAISKERDLQGTQDDYNKVINIIQNLKISDEEVSKALNLDVVFKDKKNIITKINDIKISEENNNDIKYLPSFSKVLPEILNLYRNNPKNEPFDTIETEKIVLNALIYVNKELYKKLILEDDLEENESKNIFLQELKKTLGNIDEIDENIIENYYKNAQISASKGNNKAIKKYQKKVIECYIGYLRKNYEELFDFSDFKMNIQEIKKQIKDINDNKTYERITVKTSDKTIVINDDFEYIISIFALLNSNAVINKIRNRFFATSVWLNTSEYQNIIDILDEIMQLNTLRNECITENWNLNLEEFIQKMKEIEKDFDDFKIQTKKEIFNNYYEDIKNNILTEFKDDINGCDVLEKKLEKIVIFDDETKFEIDKKSNILQDEQRKLSNINKKDLKKKVDQYIKDKDQEIKSKILCRIIFNSDFLKKYKKEIDNLIEDMESENENKFQEIYYPKERKNELYIYKKNLFLNIGNPNFDKIYGLISNDIKMADAKFLFNIDGKNIRKNKISEIDAILKNLNDKLNGYSKEYKEKYIKKLKENDDFFAKNIQNKNYKSFEKDYNRVSEYKKIRDLVEFNYLNKIESYLIDINWKLAIQMARFERDMHYIVNGLRELGIIKLSGYNTGISRAYPKRNGSDGFYTTTAYYKFFDEESYKKFEKICYGFGIDLSENSEINKPENESIRNYISHFYIVRNPFADYSIAEQIDRVSNLLSYSTRYNNSTYASVFEVFKKDVNLDYDELKKKFKLIGNNDILERLMKPKKVSVLELESYNSDYIKNLIIELLTKIENTNDTL

SEQ ID NO: 46 - RNA, 36 nt, Artificial Sequence
  source: /note="Description of Artificial Sequence: Synthetic oligonucleotide"
guuuuaguccccuucgauauugggguggucuauauc

SEQ ID NO: 47 - RNA, 95 nt, Artificial Sequence
  source: /note="Description of Artificial Sequence: Synthetic oligonucleotide"
auugaugugguauacuaaaaauggaaaauuguauuuuugauuagaaagauguaaaauugauuuaauuuaaaaauauuuuauuagauuaaaguaga

SEQ ID NO: 48 - protein, 1300 aa, Leptotrichia shahii
MSIYQEFVNKYSLSKTLRFELIPQGKTLENIKARGLILDDEKRAKDYKKAKQIIDKYHQFFIEEILSSVCISEDLLQNYSDVYFKLKKSDDDNLQKDFKSAKDTIKKQISEYIKDSEKFKNLFNQNLIDAKKGQESDLILWLKQSKDNGIELFKANSDITDIDEALEIIKSFKGWTTYFKGFHENRKNVYSSNDIPTSIIYRIVDDNLPKFLENKAKYESLKDKAPEAINYEQIKKDLAEELTFDIDYKTSEVNQRVFSLDEVFEIANFNNYLNQSGITKFNTIIGGKFVNGENTKRKGINEYINLYSQQINDKTLKKYKMSVLFKQILSDTESKSFVIDKLEDDSDVVTTMQSFYEQIAAFKTVEEKSIKETLSLLFDDLKAQKLDLSKIYFKNDKSLTDLSQQVFDDYSVIGTAVLEYITQQIAPKNLDNPSKKEQELIAKKTEKAKYLSLETIKLALEEFNKHRDIDKQCRFEEILANFAAIPMIFDEIAQNKDNLAQISIKYQNQGKKDLLQASAEDDVKAIKDLLDQTNNLLHKLKIFHISQSEDKANILDKDEHFYLVFEECYFELANIVPLYNKIRNYITQKPYSDEKFKLNFENSTLANGWDKNKEPDNTAILFIKDDKYYLGVMNKKNNKIFDDKAIKENKGEGYKKIVYKLLPGANKMLPKVFFSAKSIKFYNPSEDILRIRNHSTHTKNGSPQKGYEKFEFNIEDCRKFIDFYKQSISKHPEWKDFGFRFSDTQRYNSIDEFYREVENQGYKLTFENISESYIDSVVNQGKLYLFQIYNKDFSAYSKGRPNLHTLYWKALFDERNLQDVVYKLNGEAELFYRKQSIPKKITHPAKEAIANKNKDNPKKESVFEYDLIKDKRFTEDKFFFHCPITINFKSSGANKFNDEINLLLKEKANDVHILSIDRGERHLAYYTLVDGKGNIIKQDTFNIIGNDRMKTNYHDKLAAIEKDRDSARKDWKKINNIKEMKEGYLSQVVHEIAKLVIEYNAIVVFEDLNFGFKRGRFKVEKQVYQKLEKMLIEKLNYLVFKDNEFDKTGGVLRAYQLTAPFETFKKMGKQTGIIYYVPAGFTSKICPVTGFVNQLYPKYESVSKSQEFFSKFDKICYNLDKGYFEFSFDYKNFGDKAAKGKWTIASFGSRLINFRNSDKNHNWDTREVYPTKELEKLLKDYSIEYGHGECIKAAICGESDKKFFAKLTSVLNTILQMRNSKTGTELDYLISPVADVNGNFFDSRQAPKNMPQDADANGAYHIGLKGLMLLGRIKNNQEGKKLNLVIKNEEYFEFVQNRNN

SEQ ID NO: 49 - RNA, 36 nt, Artificial Sequence
  source: /note="Description of Artificial Sequence: Synthetic oligonucleotide"
gucuaagaacuuuaaauaauuucuacuguuguagau

SEQ ID NO: 50 - RNA, 71 nt, Artificial Sequence
  source: /note="Description of Artificial Sequence: Synthetic oligonucleotide"
aucuacaaaauuauaaacuaaauaaagauucuuauaauaacuuuauauauaaucgaaauguagagaauuuu

SEQ ID NO: 51 - protein, 1300 aa, Francisella ularensis; identical to SEQ ID NO: 48

SEQ ID NO: 52 - DNA, 138 bp, Artificial Sequence
  source: /note="Description of Artificial Sequence: Synthetic polynucleotide"
aaaaggccggcggccacgaaaaaggccggccaggcaaaaaagaaaaagggatcctacccatacgatgttccagattacgcttatccctacgacgtgcctgattatgcatacccatatgatgtccccgactatgcctaa

SEQ ID NO: 53 - protein, 1388 aa, Artificial Sequence; identical to SEQ ID NO: 29
  source: /note="Description of Artificial Sequence: Synthetic polypeptide"

SEQ ID NO: 54 - protein, 1108 aa, Artificial Sequence; identical to SEQ ID NO: 32
  source: /note="Description of Artificial Sequence: Synthetic polypeptide"

SEQ ID NO: 55 - protein, 1108 aa, Artificial Sequence; identical to SEQ ID NO: 35
  source: /note="Description of Artificial Sequence: Synthetic polypeptide"

SEQ ID NO: 56 - protein, 1334 aa, Artificial Sequence; identical to SEQ ID NO: 38
  source: /note="Description of Artificial Sequence: Synthetic polypeptide"

SEQ ID NO: 57 - protein, 1120 aa, Artificial Sequence; identical to SEQ ID NO: 41
  source: /note="Description of Artificial Sequence: Synthetic polypeptide"

SEQ ID NO: 58 - protein, 1152 aa, Artificial Sequence
  source: /note="Description of Artificial Sequence: Synthetic polypeptide"
MKVTKVDGISHKKYIEEGKLVKSTSEENRTSERLSELLSIRLDIYIKNPDNASEEENRIRRENLKKFFSNKVLHLKDSVLYLKNRKEKNAVQDKNYSEEDISEYDLKNKNSFSVLKKILLNEDVNSEELEIFRKDVEAKLNKINSLKYSFEENKANYQKINENNVEKVGGKSKRNIIYDYYRESAKRNDYINNVQEAFDKLYKKEDIEKLFFLIENSKKHEKYKIREYYHKIIGRKNDKENFAKIIYEEIQNVNNIKELIEKIPDMSELKKSQVFYKYYLDKEELNDKNIKYAFCHFVEIEMSQLLKNYVYKRLSNISNDKIKRIFEYQNLKKLIENKLLNKLDTYVRNCGKYNYYLQVGEIATSDFIARNRQNEAFLRNIIGVSSVAYFSLRNILETENENDITGRMRGKTVKNNKGEEKYVSGEVDKIYNENKQNEVKENLKMFYSYDFNMDNKNEIEDFFANIDEAISSIRHGIVHFNLELEGKDIFAFKNIAPSEISKKMFQNEINEKKLKLKIFKQLNSANVFNYYEKDVIIKYLKNTKFNFVNKNIPFVPSFTKLYNKIEDLRNTLKFFWSVPKDKEEKDAQIYLLKNIYYGEFLNKFVKNSKVFFKITNEVIKINKQRNQKTGHYKYQKFENIEKTVPVEYLAIIQSREMINNQDKEEKNTYIDFIQQIFLKGFIDYLNKNNLKYIESNNNNDNNDIFSKIKIKKDNKEKYDKILKNYEKHNRNKEIPHEINEFVREIKLGKILKYTENLNMFYLILKLLNHKELTNLKGSLEKYQSANKEETFSDELELINLLNLDNNRVTEDFELEANEIGKFLDFNENKIKDRKELKKFDTNKIYFDGENIIKHRAFYNIKKYGMLNLLEKIADKAKYKISLKELKEYSNKKNEIEKNYTMQQNLHRKYARPKKDEKFNDEDYKEYEKAIGNIQKYTHLKNKVEFNELNLLQGLLLKILHRLVGYTSIWERDLRFRLKGEFPENHYIEEIFNFDNSKNVKYKSGQIVEKYINFYKELYKDNVEKRSIYSDKKVKKLKQEKKDLYIRNYIAHFNYIPHAEISLLEVLENLRKLLSYDRKLKNAIMKSIVDILKEYGFVATFKIGADKKIEIQTLESEKIVHLKNLKKKKLMTDRNSEELCELVKVMFEYKALE

SEQ ID NO: 59 - protein, 1389 aa, Artificial Sequence; identical to SEQ ID NO: 45
  source: /note="Description of Artificial Sequence: Synthetic polypeptide"

SEQ ID NO: 60 - protein, 1300 aa, Artificial Sequence; identical to SEQ ID NO: 48
  source: /note="Description of Artificial Sequence: Synthetic polypeptide"

SEQ ID NO: 61 - DNA, 7403 bp, Artificial Sequence
  source: /note="Description of Artificial Sequence: Synthetic polynucleotide"
tatccggtcgaatcgagaatgacgaccgctacgtcttggactacgaagccgtggcccttgccgatgctctcggtgtggatgttgccgacctgttccgcaagatcgattgccccaagaacctgctgcgcaggcgggcagggtaggggagcggtttccggcggagattttcggaggcgccggtaacgttatgtcggggaatttgctatacatcgacgataattagttttgttgattcaggatcgaaatgcgctcaaacaaagaacgttccgcgtttccctcatgcgctactacgcccacaccgccatctttcggcacgcaaacaaagcagatgggttgcctgtcaatgggtgatcattgcctgaagttaccatccatcaataatataaatcatccttactccgaatgtccctcaatcgcatctatcaaggccgcgtggcggccgtcgaaacaggaacggccttagcgaaaggtaatgtcgaatggatgcctgccgcaggaggcgacgaagttctctggcagcaccacgaacttttccaagctgccatcaactactatctcgtcgccctgctcgcactcgccgacaaaaacaatcccgtacttggcccgctgatcagccagatggataatccccaaagcccttaccatgtctggggaagtttccgccgccaaggacgtcagcgcacaggtctcagtcaagccgttgcaccttatatcacgccgggcaataacgctcccacccttgacgaagttttccgctccattcttgcgggcaacccaaccgaccgcgcaactttggacgctgcactcatgcaattgctcaaggcttgtgacggcgcgggcgctatccagcaggaaggtcgttcctactggcccaaattctgcgatcctgactccactgccaacttcgcgggagatccggccatgctccggcgtgaacaacaccgcctcctccttccgcaagttctccacgatccggcgattactcacgacagtcctgcccttggctcgttcgacacttattcgattgctacccccgacaccagaactcctcaactcaccggccccaaggcacgcgcccgtcttgagcaggcgatcaccctctggcgcgtccgtcttcccgaatcggctgctgacttcgatcgccttgccagttccctcaaaaaaattccggacgacgattctcgccttaaccttcagggctacgtcggcagcagtgcgaaaggcgaagttcaggcccgtcttttcgcccttctgctattccgtcacctggagcgttcctcctttacgcttggccttctccgttccgccaccccgccgcccaagaacgctgaaacacctcctcccgccggcgttcctttacctgcggcgtccgcagccgatccggtgcggatagcccgtggcaaacgcagttttgtttttcgcgcattcaccagtctcccctgctggcatggcggtgataacatccatcccacctggaagtcattcgacatcgcagcgttcaaatatgccctcacggtcatcaaccagatcgaggaaaagacgaaagaacgccaaaaagaatgtgcggaacttgaaactgatttcgactacatgcacggacggctcgccaagattccggtaaaatacacgaccggcgaagccgaaccgccccccattctcgcaaacgatctccgcatccccctcctccgcgaacttctccagaatatcaaggtcgacaccgcactcaccgatggcgaagccgtctcctatggtctccaacgccgcaccattcgcggtttccgcgagctgcgccgcatctggcgcggccatgcccccgctggcacggtcttttccagcgagttgaaagaaaaactagccggcgaactccgccagttccagaccgacaactccaccaccatcggcagcgtccaactcttcaacgaactcatccaaaacccgaaatactggcccatctggcaggctcctgacgtcgaaaccgcccgccaatgggccgatgccggttttgccgacgatccgctcgccgcccttgtgcaagaagccgaactccaggaagacatcgacgccctcaaggctccagtcaaactcactccggccgatcctgagtattcaagaaggcaatacgatttcaatgccgtcagcaaattcggggccggctcccgctccgccaatcgccacgaacccgggcagacggagcgcggccacaacacctttaccaccgaaatcgccgcccgtaacgcggcggacgggaaccgctggcgggcaacccacgtccgcatccattactccgctccccgccttcttcgtgacggactccgccgacctgacaccgacggcaacgaagccctggaagccgtcccttggctccagcccatgatggaagccctcgcccctctcccgacgcttccgcaagacctcacaggcatgccggtcttcctcatgcccgacgtcaccctttccggtgagcgtcgcatcctcctcaatcttcctgtcaccctcgaaccagccgctcttgtcgaacaactgggcaacgccggtcgctggcaaaaccagttcttcggctcccgcgaagatccattcgctctccgatggcccgccgacggtgctgtaaaaaccgccaaggggaaaacccacataccttggcaccaggaccgcgatcacttcaccgtactcggcgtggatctcggcacgcgcgatgccggggcgctcgctcttctcaacgtcactgcgcaaaaaccggccaagccggtccaccgcatcattggtgaggccgacggacgcacctggtatgccagccttgccgacgctcgcatgatccgcctgcccggggaggatgcccggctctttgtccggggaaaactcgttcaggaaccctatggtgaacgcgggcgaaacgcgtctcttctcgaatgggaagacgcccgcaatatcatccttcgccttggccaaaatcccgacgaactcctcggcgccgatccccggcgccattcgtatccggaaataaacgataaacttctcgtcgcccttcgccgcgctcaggcccgtcttgcccgtctccagaaccggagctggcggttgcgcgaccttgcagaatcggacaaggcccttgatgaaatccatgccgagcgtgccggggagaagccttctccgcttccgcccttggctcgcgacgatgccatcaaaagcaccgacgaagccctcctttcccagcgtgacatcatccggcgatccttcgttcagatcgccaacttgatccttccccttcgcggacgccgatgggaatggcggccccatgtcgaggtcccggattgccacatccttgcgcagagcgatcccggtacggatgacaccaagcgtcttgtcgccggacaacgcggcatctctcacgagcgtatcgagcaaatcgaagaactccgtcgtcgctgccaatccctcaaccgtgccctgcgtcacaaacccggagagcgtcccgtgctcggacgccccgccaagggcgaggaaatcgccgatccctgtcccgcgctcctcgaaaagatcaaccgtctccgggaccagcgcgttgaccaaaccgcgcatgccatcctcgccgccgctctcggtgttcgactccgcgccccctcaaaagaccgcgccgaacgccgccatcgcgacatccatggcgaatacgaacgctttcgtgcgcccgctgattttgtcgtcatcgaaaacctctcccgttatctcagctcgcaggatcgtgctcgtagtgaaaacacccgtctcatgcagtggtgccatcgccagatcgtgcaaaaactccgtcagctctgcgagacctacggcatccccgtcctcgccgtcccggcggcctactcatcgcgtttttcttcccgggacggctcggccggattccgggccgtccatctgacaccggaccaccgtcaccggatgccatggagccgcatcctcgcccgcctcaaggcccacgaggaagacggaaaaagactcgaaaagacggtgctcgacgaggctcgcgccgtccggggactctttgaccggctcgaccggttcaacgccgggcatgtcccgggaaaaccttggcgcacgctcctcgcgccgctccccggcggccctgtgtttgtccccctcggggacgccacacccatgcaggccgatctgaacgccgccatcaacatcgccctccggggcatcgcggctcccgaccgccacgacatccatcaccggctccgtgccgaaaacaaaaaacgcatcctgagcttgcgtctcggcactcagcgcgagaaagcccgctggcctggaggagctccggcggtgacactctccactccgaacaacggcgcctctcccgaagattccgatgcgttgcccgaacgggtatccaacctgtttgtggacatcgccggtgtcgccaacttcgagcgagtcacgatcgaaggagtctcgcaaaaattcgccaccgggcgtggcctttgggcctccgtcaagcaacgtgcatggaaccgcgttgccagactcaacgagacagtaacagataacaacaggaacgaagaggaggacgacattccgatgtaaccattgcttcattacatctgagtctcccctcaatccctctgccccatgcgtgatataacctccacctcatgtcccggatcggcgccggcaacctgtagttcccttccatcctccaacactcccgcagatcgcgatccgctgccgccgatgccggtgcgccgccttcacaactatctctactgtccgcggcttttttatctccagtgggtcgagaatctctttgaggaaaatgccgacaccattgccggcagcgccgtgcatcgtcacgccgacaaacctacgcgttacgatgatgaaaaagccgaggcacttcgcactggtctccctgaaggcgcgcacatacgcagccttcgcctggaaaacgcccaactcggtctcgttggcgtggtggatatcgtggagggaggccccgacggactcgaactcgtcgactacaaaaaaggttccgccttccgcctcgacgacggcacgctcgctcccaaggaaaacgacaccgtgcaacttgccgcctacgctcttctcctggctgccgatggtgcgcgcgttgcgcccatggcgacggtctattacgctgccgatcgccggcgtgtcaccttcccgctcgatgacgccctctacgcccgcacccgttccgccctcgaagaggcccgcgccgttgcaacctcggggcgcatacctccgccgctcgtctctgacgtccgctgcctccattgttcctcctatgcgctttgccttccccgcgagtccgcctggtggtgccgccatcgcagcacgccgcggggagccggccacacccccatgttgccgggctttgaggatgacgccgccgccattcaccaaatctccgaacctgacaccgagccaccacccgatcttgccagccagcctccccgtcccccgcggctcgatggagaattgttggttgtccagactccgggagcgatgatcggacaaagcggcggtgagtttaccgtgtccgtcaagggtgaggttttgcgcaagcttccggttcatcaactccgggccatttacgtttacggagccgtgcaactcacggcgcatgctgtgcagaccgcccttgaggaggatatcgacgtctcctattttgcgcccagcggccgctttcttggcctcctccgcggcctgcccgcatccggcgtggatgcgcgtctcgggcaatacaccctgtttcgcgaaccctttggccgtctccgtctcgcctgcgaggcgattcgggccaagatccataaccagcgcgtcctcctcatgcgtaacggcgagcccggggagggcgtcttgcgcgaactcgcccgtctgcgcgacgccaccagtgaggcgacttcgctcgacgaactcctcggcatcgagggcatcgccgcgcatttctatttccagtattttcccaccatgctgaaagaacgggcggcctgggcctttgatttttccggacgcaatcgccgcccgccgcgcgacccggtcaacgccctgctttcgttcggttacagcgtgttgtccaaggaacttgccggcgtctgccacgctgttggcctagacccgtttttcggcttcatgcaccagccgcgttacgggcgccccgcactcgctctcgatctgatggaggagtttcgccctctcatcgccgacagtgttgccctgaatctcatcaaccgtggcgaactcgacgaaggggactttatccggtcggccaatggcaccgcgctcaatgatcggggccgccggcgtttttgggaggcatggttccggcgtctcgacagcgaagtcagccatcctgaatttggttacaagatgagctatcgacggatgcttgaagtgcaggcgcgccagctatggcgctatgtgcgcggtgacgccttccgctaccacggattcaccacccgttgattccgatgtcagatccccgccgccgttatcttgtgtgttacgacatcgccaatccgaagcgattgcgccaagtggccaagctgctggagagctatggcacgcgtctgcaatactcggttttcgaatgtcctttggacgatcttcgtcttgaacaggcgaaggctgatttgcgcgacacgattaatgccgaccaagaccaggtgttatttgtttcgcttggccccgaagccaacgatgccacgttgatcatcgccacgcttgggctcccttataccgtgcgctcgcgagtgacgattatctgacccataacccacgtgttgaagaggctgaaaacagacggacctctatgaagaacaattgacgttttggccgaactcagcagacctttatgcggctaaggccaatgatcatccatcctaccgccattgggctggagacgttttttgaaacggcgagtgctgcggatagcgagtttctcttggggaggcgctcgcggccacttttacagaggagatgttcgggcgaactggccgacctaacaaggcgtacccggctcaaaatcgaggcacgctcgcacgggatgatgtaattcgttgtttttcagcataccgtgcgagcacgggccgcagcgaatgccgtttcacgaatcgtcaggcggcggggagaagtcatttaataaggccactgttaaaagccgcagcgaatgccgtttcacgaatcgtcaggcgggcagtggatgtttttccatgaggcgaagaatttcatcgccgcagtgaatgccgtttcaccattgatgaagaatgcgaggtgaaaacagagaaattgggtcaactctatcactcttattcagccatcgtttcaagaaaggatacctcgtattggatacaacacagctcgttcgttctctctacctccctcgacaatctcaagga

SEQ ID NO: 62 - DNA, 6789 bp, Artificial Sequence
  source: /note="Description of Artificial Sequence: Synthetic polynucleotide"
taataaaattgaaatatcactatggattattgtaatattaccataaagataggtgacgtttttttgaaaattgtaaacctaatttgaagaaaaccaattaaaaatcgcttcggcttttttttaagtgccaggtagcattgatgctaacccatgtgtaataaaggtttgttttccttcggggcacgaacacattataagggaaacctaaagattccctttcttgtttaatattataaccagtgaaaataagaataatgcacctaaaactaatatacagaaaataagaattaaaagtactaatatatacatcatatgttatcctccaatgctttattttttaataattgatgttagtattagttttattttaatttctaaacataagaatttgaaaaggatgtgtttattatggcgacacgcagttttattttaaaaattgaaccaaatgaagaagttaaaaagggattatggaagacgcatgaggtattgaatcatggaattgcctactacatgaatattctgaaactaattagacaggaagctatttatgaacatcatgaacaagatcctaaaaatccgaaaaaagtttcaaaagcagaaatacaagccgagttatgggattttgttttaaaaatgcaaaaatgtaatagttttacacatgaagttgacaaagatgttgtttttaacatcctgcgtgaactatatgaagagttggtccctagttcagtcgagaaaaagggtgaagccaatcaattatcgaataagtttctgtacccgctagttgatccgaacagtcaaagtgggaaagggacggcatcatccggacgtaaacctcggtggtataatttaaaaatagcaggcgacccatcgtgggaggaagaaaagaaaaaatgggaagaggataaaaagaaagatccccttgctaaaatcttaggtaagttagcagaatatgggcttattccgctatttattccatttactgacagcaacgaaccaattgtaaaagaaattaaatggatggaaaaaagtcgtaatcaaagtgtccggcgacttgataaggatatgtttatccaagcattagagcgttttctttcatgggaaagctggaaccttaaagtaaaggaagagtatgaaaaagttgaaaaggaacacaaaacactagaggaaaggataaaagaggacattcaagcatttaaatcccttgaacaatatgaaaaagaacggcaggagcaacttcttagagatacattgaatacaaatgaataccgattaagcaaaagaggattacgtggttggcgtgaaattatccaaaaatggctaaagatggatgaaaatgaaccatcagaaaaatatttagaagtatttaaagattatcaacggaaacatccacgagaagccggggactattctgtctatgaatttttaagcaagaaagaaaatcattttatttggcgaaatcatcctgaatatccttatttgtatgctacattttgtgaaattgacaaaaaaaagaaagacgctaagcaacaggcaacttttactttggctgacccgattaaccatccgttatgggtacgatttgaagaaagaagcggttcgaacttaaacaaatatcgaattttaacagagcaattacacactgaaaagttaaaaaagaaattaacagttcaacttgatcgtttaatttatccaactgaatccggcggttgggaggaaaaaggtaaagtagatatcgttttgttgccgtcaagacaattttataatcaaatcttccttgatatagaagaaaaggggaaacatgcttttacttataaggatgaaagtattaaattcccccttaaaggtacacttggtggtgcaagagtgcagtttgaccgtgaccatttgcggagatatccgcataaagtagaatcaggaaatgttggacggatttattttaacatgacagtaaatattgaaccaactgagagccctgttagtaagtctttgaaaatacatagggacgatttccccaagttcgttaattttaaaccgaaagagctcaccgaatggataaaagatagtaaagggaaaaaattaaaaagtggtatagaatcccttgaaattggtctacgggtgatgagtatcgacttaggtcaacgtcaagcggctgctgcatcgatttttgaagtagttgatcagaaaccggatattgaagggaagttattttttccaatcaaaggaactgagctttatgctgttcaccgggcaagttttaacattaaattaccgggtgaaacattagtaaaatcacgggaagtattgcggaaagctcgggaggacaacttaaaattaatgaatcaaaagttaaactttctaagaaatgttctacatttccaacagtttgaagatatcacagaaagagagaagcgtgtaactaaatggatttctagacaagaaaatagtgatgttcctcttgtatatcaagatgagctaattcaaattcgtgaattaatgtataaaccctataaagattgggttgcctttttaaaacaactccataaacggctagaagtcgagattggcaaagaggttaagcattggcgaaaatcattaagtgacgggagaaaaggtctttacggaatctccctaaaaaatattgatgaaattgatcgaacaaggaaattccttttaagatggagcttacgtccaacagaacctggggaagtaagacgcttggaaccaggacagcgttttgcgattgatcaattaaaccacctaaatgcattaaaagaagatcgattaaaaaagatggcaaatacgattatcatgcatgccttaggttactgttatgatgtaagaaagaaaaagtggcaggcaaaaaatccagcatgtcaaattattttatttgaagatttatctaactacaatccttacgaggaaaggtcccgttttgaaaactcaaaactgatgaagtggtcacggagagaaattccacgacaagtcgccttacaaggtgaaatttacggattacaagttggggaagtaggtgcccaattcagttcaagattccatgcgaaaaccgggtcgccgggaattcgttgcagtgttgtaacgaaagaaaaattgcaggataatcgcttttttaaaaatttacaaagagaaggacgacttactcttgataaaatcgcagttttaaaagaaggagacttatatccagataaaggtggagaaaagtttatttctttatcaaaggatcgaaagttggtaactacgcatgctgatattaacgcggcccaaaatttacagaagcgtttttggacaagaacacatggattttataaagtttactgcaaagcctatcaggttgatggacaaactgtttatattccggagagcaaggaccaaaaacaaaaaataattgaagaatttggggaaggctattttattttaaaagatggtgtatatgaatggggtaatgcggggaaactaaaaattaaaaaaggttcctctaaacaatcatcgagtgaattagtagattcggacatactgaaagattcatttgatttagcaagtgaacttaagggagagaaactcatgttatatcgagatccgagtggaaacgtatttccttccgacaagtggatggcagcaggagtattttttggcaaattagaaagaatattgatttctaagttaacaaatcaatactcaatatcaacaatagaagatgattcttcaaaacaatcaatgtaaaagtttgcccgtataagaacttaattaattaggatggtaggatgttactaaatatgtctgtaggcatcattcctactatccgttttgtccgaatatcagagcattaggtgaggaatggtaagaaaggaaaatttatatgaaccaaccgattcctattcgaatgttaaatgaaatacaatattgtgagcgacttttttactttatgcatgtccaaaagctatttgatgagaatgcagatacagttgaaggaagtgcacagcatgagcgggcagaaagaagcaaaagaccaagtaaaatgggaccaaaggaattatggggtgaggcgccaagaagtcttaagcttggtgatgagctgttaaatattaccggtgttcttgatgccataagtcatgaagagaacagttggatcccggttgaatcaaaacacagttccgcaccggatggattgaacccttttaaagtagatggctttctacttgacgggtctgcatggccaaacgatcaaattcaactttgtgcacaaggcttgctcttgaatgccaatggatacccgtgtgattatgggtatttattttatcgtggtaataagaaaaaggtgaaaatttattttactgaagatttaatcgctgccacaaagtactatattaaaaaagcacacgagatactagtattatctggtgatgaatcagctattcctaagcctttaattgattctaataagtgttttcgctgttctttaaactatatctgtcttccggatgaaacgaactatctattaggggcaagttcaacaattcgtaaaattgtgccttcaaggacagatggtggcgttttatatgtatcagagtctggtacaaaattaggaaaatcgggtgaggagttaatcattcagtataaagatggccaaaagcagggtgttcctataaaagatattattcaagtttcgttaattggaaatgttcaatgctcaacgcaattacttcattttttaatgcaatcaaatattcctgtaagttatttatcatcccacggtcgtttgattggtgtcagttcatctttagttacaaaaaatgttttaacaaggcagcaacagttcattaaatttacaaatcctgagtttggactaaatctagcaaaacaaattgtttatgccaagattcgaaatcaacgaactttacttagaagaaatggggggagtgaggtaaaggagattttaacagatttaaaatctttaagtgacagtgcactgaacgcaatatcaatagaacaattacggggtattgaagggatttctgcaaaacattatttcgcaggatttccgtttatgttgaaaaatgaattacgtgaattgaatttaatgaaagggcgtaataggagaccgccaaaagatcctgtaaatgtacttctttctcttggttatactttattgacacgtgatattcatgctgcgtgtggttcagtcggattggatccgatgtttggttgttaccatcgtccagaagcaggtcgaccggctctagtattagatgttatggaaacatttcgaccacttattgtagacagtattgtcatccgagctttgaatacgggtgaaatctcattaaaagatttttatataggaaaagatagttgtcaattattaaaacatggccgcgattccttttttgccatttatgaaagaagaatgcatgaaactattaccgatccaattttcggctataagattagctatcgccgtatgctcgatttgcacattcgaatgcttgcaaggtttattgaaggggaactgccggaatataaaccattaatgacccggtgagtttgtttattaggttaaaagaaggtgaagacatgcagcaatacgtccttgtttcttatgatatttcggaccaaaaaagatggagaaaagtatttaaactgatgaaaggatacggagaacatgttcaatattccgtattcatatgccagttaactgaattacagaaggcaaaattacaagcctctttagaagacattatccatcataagaatgaccaagtaatgtttgttcacatcgggccagtgaaagatggtcaactatctaaaaaaatctcaacaattgggaaagaatttgttccattggatttaaagcggcttatattttgaaaagatatagcaaagaaatcttatgaaaaaaatacaaaaatatattgttaaaaaatagggaatattatataatggacttacgaggttctgtcttttggtcaggacaaccgtctagctataagtgctgcaggggtgtgagaaactcctattgctggacgatgtctcttttatttcttttttcttggatctgagtacgagcacccacattggacatttcgcatggtgggtgctcgtactataggtaaaacaaacctttttaagaagaatacaaaaataaccacaatattttttaaaaggaattttgatggatttacataacctctcgcaacatgcttctaaaacccaagcccaccatagcccaaaaccccctgcggtccaagaaaaaagaaatgatacgaggcattagcaccggggagaagtcatttaataaggccactgttaaaagtccaagaaaaaagaaatgatacgaggcattagcacaacaatataaacgactactttaccgtgttcaagaaaaaagaaatgatatgaggcattagcacgatgggatgggagagagaggacagttctactcttgctgtatccagcttcttttactttatccggtatcatttcttcacttctttctgcacataaaaaagcacctaactatttggataagttaagtgcttttatttccgtttgaagttgtctattgcttttttcttcatatcttcaaattttttctgtttctcagagtcaactttaccaactgtaatcccttttctttttggcattggggtatctttccaccttagtgtgttcataaggcttatatttatcactcattgtattcctccaacacaattataatttttccgtcatcctcaatccaaccgtcaactgtgacaaaagacgaatctctcttat

SEQ ID NO: 63 - DNA, 6214 bp, Artificial Sequence
  source: /note="Description of Artificial Sequence: Synthetic polynucleotide"
gtttcatttggaaagggagagcattggcttttctctttgtaaataaagtgcaagctttgtaataagcttctagtggagaagtgattgtttgaatcacccaatgcacacgcactaaagttagacgaacctataattcgtattagtaagtatagtacatgaagaaaaatgcaacaagcatttactctcttttaaataaagaattgatagctgttaatattgatagtatattataccttatagatgttcgattttttttgaaattcaaaaatcatacttagtaaagaaaggaaataacgtcatggacaagcgaaagcgtagaagttacgagtttaggtgggaagcgggaggcaccagtcatggcaatccgtagcataaaactaaaactaaaaacccacacaggcccggaagcgcaaaacctccgaaaaggaatatggcggacgcatcggttgttaaatgaaggcgtcgcctattacatgaaaatgctcctgctctttcgtcaggaaagcactggtgaacggccaaaagaagaactacaggaagaactgatttgtcacatacgcgaacagcaacaacgaaatcaggcagataaaaatacgcaagcgcttccgctagataaggcactggaagctttgcgccaactatatgaactgcttgtcccctcctcggtcggacaaagtggcgacgcccagatcatcagccgaaagtttctcagcccgctcgtcgatccgaacagcgaaggcggcaaaggtacttcgaaggcaggggcaaaacccacttggcagaagaaaaaagaagcgaacgacccaacctgggaacaggattacgaaaaatggaaaaaaagacgcgaggaagacccaaccgcttctgtgattactactttggaggaatacggcattagaccgatctttcccctgtacacgaacaccgtaacagatatcgcgtggttgccacttcaatccaatcagtttgtgcgaacctgggacagagacatgcttcaacaagcgattgaaagactgctcagttgggagagctggaacaaacgtgtccaggaagagtatgccaagctgaaagaaaaaatggctcaactgaacgagcaactcgaaggcggtcaggaatggatcagcttgctagagcagtacgaagaaaaccgagagcgagagcttagggaaaacatgaccgctgccaatgacaagtatcggattaccaagcggcaaatgaaaggctggaacgagctgtacgagctatggtcaacctttcccgccagtgccagtcacgagcaatacaaagaggcgctcaagcgtgtgcagcagcgactgagagggcggtttggggatgctcatttcttccagtatctgatggaagagaagaaccgcctgatctggaaggggaatccgcagcgtatccattattttgtcgcgcgcaacgaactgacgaaacggctggaggaagccaagcaaagcgccacgatgacgttgcccaatgccaggaagcatccattgtgggtgcgcttcgatgcacggggaggaaatttgcaagactactacttgacggctgaagcggacaaaccgagaagcagacgttttgtaacgtttagtcagttgatatggccaagcgaatcgggatggatggaaaagaaagacgtcgaggtcgagctagctttgtccaggcagttttaccagcaggtgaagttgctgaaaaatgacaaaggcaagcagaaaatcgagttcaaggataaaggttcgggctcgacgtttaacggacacttggggggagcaaagctacaactggagcggggcgatttggagaaggaagaaaaaaacttcgaggacggggaaatcggcagcgtttaccttaacgttgtcattgatttcgaacctttgcaagaagtgaaaaatggccgcgtgcaggcgccgtatggacaagtactgcaactcattcgtcgccccaacgagtttcccaaggtcactacctataagtcggagcaacttgttgaatggataaaagcttcgccacaacactcggctggggtggagtcgctggcatccggttttcgtgtaatgagcatagaccttgggctgcgcgcggctgcagcgacttctattttttctgtagaagagagtagcgataaaaatgcggctgatttttcctactggattgaaggaacgccgctggtcgctgtccatcagcggagctatatgctcaggttgcctggtgaacaggtagaaaaacaggtgatggaaaaacgggacgagcggttccagctacaccaacgtgtgaagtttcaaatcagagtgctcgcccaaatcatgcgtatggcaaataagcagtatggagatcgctgggatgaactcgacagcctgaaacaagcggttgagcagaaaaagtcgccgctcgatcaaacagaccggacattttgggaggggattgtctgcgacttaacaaaggttttgcctcgaaacgaagcggactgggaacaagcggtagtgcaaatacaccgaaaagcagaggaatacgtcggaaaagccgttcaggcatggcgcaagcgctttgctgctgacgagcgaaaaggcatcgcaggtctgagcatgtggaacatagaagaattggagggcttgcgcaagctgttgatttcctggagccgcaggacgaggaatccgcaggaggttaatcgctttgagcgaggccataccagccaccagcgtctgttgacccatatccaaaacgtcaaagaggatcgcctgaagcagttaagtcacgccattgtcatgactgccttggggtatgtttacgacgagcggaaacaagagtggtgcgccgaatacccggcttgccaggtcattctgtttgaaaatctgagccagtaccgttctaacctggatcgctcgaccaaagaaaactccaccttgatgaagtgggcgcatcgcagcattccgaaatacgtccacatgcaggcggagccatacgggattcagattggcgatgtccgggcggaatattcctctcgtttttacgccaagacaggaacgccaggcattcgttgtaaaaaggtgagaggccaagacctgcagggcagacggtttgagaacttgcagaagaggttagtcaacgagcaatttttgacggaagaacaagtgaaacagctaaggcccggcgacattgtcccggatgatagcggagaactgttcatgaccttgacagacggaagcggaagcaaggaggtcgtgtttctccaggccgatattaacgcggcgcacaatctgcaaaaacgtttttggcagcgatacaatgaactgttcaaggttagctgccgcgtcatcgtccgagacgaggaagagtatctcgttcccaagacaaaatcggtgcaggcaaagctgggcaaagggctttttgtgaaaaaatcggatacagcctggaaagatgtatatgtgtgggacagccaggcaaagcttaaaggtaaaacaacctttacagaagagtctgagtcgcccgaacaactggaagactttcaggagatcatcgaggaagcagaagaggcgaaaggaacataccgtacactgttccgcgatcctagcggagtcttttttcccgaatccgtatggtatccccaaaaagatttttggggcgaggtgaaaaggaagctgtacggaaaattgcgggaacggtttttgacaaaggctcggtaagggtgtgcaaggagagtgaatggcttgtcctggatacctgtccgcatgctaaatgaaattcagtattgtgagcgactgtaccatattatgcatgtgcaggggctgtttgaggaaagcgcagacacggtcgaaggagcagcacaacacaagcgtgcagagacacatctgcgcaaaagcaaggcagcgccggaagagatgtggggggacgctccgtttagcttgcagctcggcgaccctgtgcttggcattacgggaaagctggatgccgtctgtctggaagaaggtaagcagtggattccggtagaaggaaagcattcggcgtcgccagaaggcgggcagatgttcactgtaggcgtgtattcgctggacggttctgcctggcccaacgaccaaatccaattgtgtgcgcaaggcttgctgcttcgcgcgaatggatatgaatccgattatggctacttatactaccgtggcaataaaaagaaggttcgcattcctttttcgcaggaactcatagcggctactcacgcctgcattcaaaaagctcatcagcttcgggaagccgaaattccccctccgttgcaggagtcgaaaaagtgctttcgatgctcgttaaattacgtatgcatgcctgacgagacgaattacatgttggggttgagcgcaaacatcagaaagattgtgcccagtcgtccagatggcggggtactgtatgttacagagcagggggcaaaactgggcagaagcggagaaagcttgaccatcacctgccggggcgaaaagatagacgaaatcccgatcaaagacttgattcacgtgagcttgatggggcatgtgcaatgctctacgcagcttctgcacaccttgatgaactgtggcgtccacgtcagctacttgactacgcatggcacattgacaggaataatgactccccctttatcgaaaaacattcgaacaagagccaagcagtttatcaaatttcagcacgcggagatcgcccttggaatcgcgagaagggtcgtgtatgcgaaaatttccaatcagcgcacgatgctgcgccgcaatggctcaccagataaagcagttttaaaagagttaaaagagcttagagatcgcgcgtgggaggcgccatcactggaaatagtgagaggtatcgagggacgtgcagcacagttgtacatgcagtttttccctaccatgttaaagcacccagtagtagacggtatggcgatcatgaacggtcgcaaccgtcgcccgcccaaagatccggtcaatgcgctgctctccctcggctatacgcttctttcacgggatgtttactccgcatgtgccaatgtcggactcgatccactgttcggctttttccatacgatggagccgggcagaccagctttggcactcgatctgatggaaccgttccgcgccttgattgccgatagcgtagcgatacgtaccttgaatacggaggaactcaccctcggggacttttattggggaaaagacagttgttatttgaaaaaggcaggaagacaaacgtatttcgctgcctatgaaagacggatgaacgagacgctgacgcatccgcaatttgggtataagctcagctatcgccgtatgctggagctggaagcaaggtttttggcccggtatctggatggagagctggtggaatatacgccgctcatgacaaggtaggaaatgaccatgcgacaatttgttctggtaagctatgatattgccgatcaaaaacgttggagaaaagtattcaagctgatgaaggggcaaggcgagcacgtccagtactcggtgtttctgtgccaactcaccgagattcagcaagccaagctaaaggtaagcctggcggagctggttcaccatggagaagaccaggtcatgtttgtaaaaatcggcccagtgacgagagatcaactggacaagcggatatctactgttggcagggagtttctgcctcgcgatttgaccaaatttatctattaaggaatgaagaaagctagttgtaacaaaagtggaaaaagagtaaaataaaggtgtcagtcgcacgctataggccataagtcgacttacatatccgtgcgtgtgcattatgggcccatccacaggtctattcccacggataatcacgactttccactaagctttcgaattttatgatgcgagcatcctctcaggtcaaaaaagccgggggatgctcgaactctttgtgggcgtaggctttccagagttttttaggggaagaggcagccgatggataagaggaatggcgattgaattttggcttgctcgaaaaacgggtctgtaaggcttgcggctgtaggggttgagtgggaaggagttcgaaagcttagtggaaagcttcgtggttagcaccggggagaagtcatttaataaggccactgttaaaagttcgaaagcttagtggaaagcttcgtggttagcacgctaaagtccgtctaaactactgagatcttaaatcggcgctcaaataaaaaacctcgctaatgcgaggtttcagc

SEQ ID NO: 64 - DNA, 12338 bp, Artificial Sequence
  source: /note="Description of Artificial Sequence: Synthetic polynucleotide"
gaagttatgttgataaaatggtttatgaaaacgtgagtctgtggtagtattataaacaatgatggaataaagtgttttttgcgccgcacggcatgaattcaggggttagcttggttttgtgtataaataaatgttctacatatttattttgttttttgcgccgcaaaatgcaactgaaagccgcatctagagcaccctgtagaagacagggttttgagaatagcccgacatagagggcaatagacacggggagaagtcatttaataaggccactgttaaaagttttgagaatagcccgacatagagggcaatagacttttgcttcgtcacggatggacttcacaatggcaacaacgttttgagaatagcccgacatagttatagagatgtataaatataaccgataaacattgactaatttgttgaagtcagtgtttatcggttttttgtgtaaatataggagttgttagaatgatactttttgcctaattttggaactttatgaggatataagatagacttgataaaaaggtaaaagaaaggttaaagagcatggcaggaatagtgacctgtgatgaagatgatggtagaattaaaagtgttcttaaagaaaaacaatattggataaggaaaataattcaatagataaaaaatttagggggaaaaatgaaaatatcaaaagtcgatcataccagaatggcggttgctaaaggtaatcaacacaggagagatgagattagtgggattctctataaggatccgacaaagacaggaagtatagattttgatgaacgattcaaaaaactgaattgttcggcgaagatactttatcatgtattcaatggaattgctgagggaagcaataaatacaaaaatattgttgataaagtaaataacaatttagatagggtcttatttacaggtaagagctatgatcgaaaatctatcatagacatagatactgttcttagaaatgttgagaaaattaatgcatttgatcgaatttcaacagaggaaagagaacaaataattgacgatttgttagaaatacaattgaggaaggggttaaggaaaggaaaagctggattaagagaggtattactaattggtgctggtgtaatagttagaaccgataagaagcaggaaatagctgattttctggagattttagatgaagatttcaataagacgaatcaggctaagaacataaaattgtctattgagaatcaggggttggtggtctcgcctgtatcaaggggagaggaacggatttttgatgtcagtggcgcacaaaagggaaaaagcagcaaaaaagcgcaggagaaagaggcactatctgcatttctgttagattatgctgatcttgataagaatgtcaggtttgagtatttacgtaaaattagaagactgataaatctatatttctatgtcaaaaatgatgatgttatgtctttaactgaaattccggcagaagtgaatctggaaaaagattttgatatctggagagatcacgaacaaagaaaggaagagaatggagattttgttggatgtccggacatacttttggcagatcgtgatgtgaagaaaagtaacagtaagcaggtaaaaattgcagagaggcaattaagggagtcaatacgtgaaaaaaatataaaacgatatagatttagcataaaaacgattgaaaaggatgatggaacatacttttttgcaaataagcagataagtgtattttggattcatcgcattgaaaatgctgtagaacgtatattaggatctattaatgataaaaaactgtatagattacgtttaggatatctaggagaaaaagtatggaaggacatactcaattttctcagcataaaatacattgcagtaggcaaggcagtattcaattttgcaatggatgatctgcaggagaaggatagagatatagaacccggcaagatatcagaaaatgcagtaaatggattgacttcgtttgattatgagcaaataaaggcagatgagatgctgcagagagaagttgctgttaatgtagcattcgcagcaaataatcttgctagagtaactgtagatattccgcaaaatggagaaaaagaggatatccttctttggaataaaagtgacataaaaaaatacaaaaagaattcaaagaaaggtattctgaaatctatacttcagttttttggtggtgcttcaacttggaatatgaaaatgtttgagattgcatatcatgatcagccaggtgattacgaagaaaactacctatatgacattattcagatcatttactcgctcagaaataagagctttcatttcaagacatatgatcatggggataagaattggaatagagaactgataggaaagatgattgagcatgatgctgaaagagtcatttctgttgagagggaaaagtttcattccaataacctgccgatgttttataaagacgctgatctaaagaaaatattggatctcttgtatagcgattatgcaggacgtgcatctcaggttccggcatttaacactgtcttggttcgaaagaactttccggaatttcttaggaaagatatgggctacaaggttcattttaacaatcctgaagtagagaatcagtggcacagtgcggtgtattacctatataaagagatttattacaatctatttttgagagataaagaggtaaagaatcttttttatacttcattaaaaaatataagaagtgaagtttcggacaaaaaacaaaagttagcttcagatgattttgcatccaggtgtgaagaaatagaggatagaagtcttccggaaatttgtcagataataatgacagaatacaatgcgcagaactttggtaatagaaaagttaaatctcagcgtgttattgaaaaaaataaggatattttcagacattataaaatgcttttgataaagactttagcaggtgctttttctctttatttgaagcaggaaagatttgcatttattggtaaggcaacacctataccatacgaaacaaccgatgttaagaattttttgcctgaatggaaatccggaatgtatgcatcgtttgtagaggagataaagaataatcttgatcttcaagaatggtatatcgtcggacgattccttaatgggaggatgctcaatcaattggcaggaagcctgcggtcatacatacagtatgcggaagatatagaacgtcgtgctgcagaaaataggaataagcttttctccaagcctgatgaaaagattgaagcatgtaaaaaagcggtcagagtgcttgatttgtgtataaaaatttcaactagaatatctgcggaatttactgactattttgatagtgaagatgattatgcagattatcttgaaaaatatctcaagtatcaggatgatgccattaaggaattgtcaggatcttcgtatgctgcgttggatcatttttgcaacaaggatgatctgaaatttgatatctatgtaaatgccggacagaagcctatcttacagagaaatatcgtgatggcaaagctttttggaccagataacattttgtctgaagttatggaaaaggtaacagaaagtgccatacgagaatactatgactatctgaagaaagtttcaggatatcgggtaaggggaaaatgtagtacagagaaagaacaggaagatctgctaaagttccaaagattgaaaaacgcagtagaattccgggatgttactgaatatgctgaggttattaatgagcttttaggacagttgataagttggtcatatcttagggagagggatctattatatttccagctgggattccattacatgtgtctgaaaaacaaatctttcaaaccggcagaatatgtggatattcgtagaaataatggtacgattatacataatgcgatactttaccagattgtttcgatgtatattaatggactggatttctatagttgtgataaagaagggaaaacgctcaaaccaattgaaacaggaaagggcgtaggaagtaagataggacaatttataaagtattcccagtatttatacaatgatccgtcatataagcttgagatctataatgcaggattagaagtttttgaaaacattgatgaacatgataatattacagatcttagaaagtatgtggatcattttaagtattatgcatatggtaataaaatgagcctgcttgatctgtatagtgaattcttcgatcgtttctttacatatgatatgaagtatcagaagaatgtagtgaatgtgttggagaatatccttttaaggcattttgtaattttctatccgaagtttggatcaggaaaaaaagatgttggaattagggattgtaaaaaagaaagagctcagattgaaataagtgagcagagcctcacatcggaagacttcatgtttaagcttgacgacaaagcaggagaagaagcaaagaagtttccggcaagggatgaacgttatctccagacaatagccaagttgctctattatcctaacgaaattgaggatatgaacagattcatgaagaaaggagaaacgataaataaaaaagttcagtttaatagaaaaaagaagataaccaggaaacaaaagaataattcatcaaacgaggtattgtcttcaactatgggttatttatttaagaacattaaattgtaaaaaagattcgttgtagataattgataggtaaaagctgaccggagcctttggctccggacagttgtatataagaggatattaatgactgaaaatgatttttgttggaagtcagttttttctgtggaaagcgaaatcgaatatgatgagtatgcatatggcagaagagctgtagaaggcgagaatacatatgattacattactaaggaagaaagaccggaacttaatgacgaatatgtagcgagacgttgcattttcggtaaaaaagcaggaaaaatatccaggtcggattttagtaggataagatctgcgttggatcatgcgatgataaataatacacatacagcatttgccagatttatcactgaaaatctgacgagactcaatcacaaagaacattttctgaatgtgacacgtgcatattctaaacctgattctgaaaaattgatacaaccgagatactggcagtcgcctgtagttccaaaggataaacaaatatattatagcaagaatgcgattaaaaaatggtgtggttacgaagatgatattccgcctcgttctgtgatagttcagatgtgtctattgtgggggactgatcatgaagaggcagatcatatccttcgcagttcaggatacgcggcgcttagtcctgttgtacttcgagatcttatctatatgtattatctggatcatcaggatttgcaaaaaaatgagttgatatgggaagtaaaaaagcagttggatcacttcgatttgacaaatagaaattatgatacaaatccttttgatgtagggggcagcgtaaatgatcatatctgtgaactgagcgagcatatagcgaaggctcattatatttatgagagggctaaggaaggaccattgcaaaatgtaattcgggatattttgggagatacacctgccctttattctgaaatggcatttcctcagctagcatctataaacaggtgtgcttgcaattcgctttcttcatatcaaaaaaatatttttgatactgacatagctatatatgcagatgaaaaggacacaagaggtaaatcagaccgtatccttgttgagggcgcatcttcgaaatggtatgaattgaagaaacgcgatgctaataatgtcaaaatttctgaaaagctgagtatactcaatactattcttaaatttaatagtgttttttgggaagaatgttaccttgatggaaatataaaacaatcgagcggaaagcgatctgaggcaggaaaaattctttatggtcgcgacaacggaaaagaaaatgtcggagtttcaaaattggaattggtgcggtatatgatagctgcaggtcaggaacaaaatctgggaaattacctggtgagttcaggattttggagaaaaaatcatatgctgtcatttatacaaggcaatgatatagcgcttgatgagatggatgaattggatctcttagactatattctgatatatgcatggggatttagggaaaatatcattaaaaagaacagtaatgtgaattctttggatgaaaagactagaaaagtgcagtttccgtttataaagttactcatggcaattgcaagagatatccagatacttatatgttcagcacatgaaaaaacagtcgatgagtcatctcgaaatgcagcaaagaagatagatatattgggaaattatattccttttcagattcatcttcagagaactaaaaaagatggtggaagagtggtaatggatacattgtgtgctgattggattgcggattatgaatggtacattgatcttgagaaaggaacacttggatgagcagtgatgaaaggatatttaaaaaatttttggaaaaaggatcgatttctgagcagaaaaagatgcttttagaagaaaagaaatgttcggataaactaactgcactgcttgggaattactgcataccgatagacaatatttcagagtcagacggaaaaatatatgcggtctataagcttccaaaaaatgttaaacctttgtccgaaatcattaatgatgtatccttttctgattgtacgatgagagtacgtttgcttctcataaagagaattctggaactcgtgtgtgcttttcacgaaaaaaaatggtattgtctcagtatttcaccgggaatgctcatggttgaagattttgatataccgatgggaaatgtcggaaaagtattgatatatgatttcagaaatcctgttccgttcgagtcagtaaatgaaagacataattttaacgtttcaaataaatacacttcaccggagctgctcatccattcaagatatgacgagtcgaaatctgtgagtgaaaaatcagatttgtattctgttgcaaaaattgcggaaacaataataggagattttaacagtattattgcaaatggaaatttgatactacttgcaatgcttagagtttttatcagtacagggaaaagtccggaacctgagtatcggtttgaatcgtcggaaaatatgctttcagtatttgaaaatttgatcaaagaaaattgtttttttgaaaaaaacgattatacatctatgtttcatcaggcgtatgacaatttttttgaatggcaggaatgtttgatatcaccggatcacttggataaaaatatgttcgaggcagctttatcaaatcttgaggatcagctgcttagggttgatattgataagtatagagcagagtacttctataagcttctccgagagttgtctaataaatataaaaatacaattactgatgaacaaaaggtaaggttggcaatacttggaatcagagcgaaaaataatctgggaaaaagttttgatgcattggaaatatatgagtcagtacgtgatttagaaactatgttggaggagatggcagagcttagtcctgtcattgcttcgacatatatggattgctaccgatatgcagatgcgcagaaagtggcggaagaaaacattatcaggcttcataatagtaatattcgtatggagaaaaaaagaatactgcttggaaggtcatatagttcaaaagggtgcagcatggggtttcagcatattcttggtgcggatgagtcatttgaacaggctttatatttctttaacgaaaaggacaatttttggaaagaaatatttgagagcagaaatttagaggacagcgatagacttataaagtctttacgaagcaatacgcatattacgctgtttcattacatgcaatatgcatgtgaaacaaggagaaaggaattatatggagcactttcagacaaatattttataggtaaagaatggacagaaagactcaaagcatatataagcaacaaggatatatggaaaaactattatgagatatatattctgctaaagggtatttattgcttctatccagaagtcatgtgttcgtctgcgttttatgatgaaatccaaaaaatgtacgatcttgaatttgaaaaggaaaaaatgttttacccattgagtctgatagaactgtatcttgctctgatagagataaaagttaatgggagtctgacggagaatgccgagaagttgtttaaacaggcattgacacatgacaatgaagtcaaaaaaggaaatatgaatattcagaccgccatttggtatcgaatatatgcactgtataacgatgtaaaagatgaaactgataagaataaaaggcttttaaaacggcttatgattctttgccgacgatttggttgggcggatatgtatagtgctttggagaaggatgggaagttaattgattttttgagatttgaggtatgttaaatgataacacttgcattagatgaaaatggcaaatttgaagatgctttttctaaaaaaaatgaaaaaccgataatgattgcggggataatctatgatgacaaggggaaagagtatgatgctgagaatgaacgctacaggatatccagttatctgcgagcagtatgtgacagtttgggtgcgaaataccctcaggatctacattcaaatagtaatggaaataaggcgactgttgggaaagtaaaatgtaaaattggtgaaacactaaaggaattcttgagagaaggaacctatgaaaaaaaggaattgccgacaaagaacggttatttaaataagagatctggaaaatatgtaatgtttgcagaactcaggagtagtcagggagttaaaaagcgtgttagtggttggaatgacaatgatctgactcaggatgaaaaggtcagcaatctgtaccttcatatggcagaaaatgccgttgtcagaatgctcttccataatcctatatatgaagatgtaacagatgtaaatctctattttcccacgcgaaaagttgttctgaaagatagagatagagaatacgataaacaagatttcaaaatatatggtgataaggacaagtgcgaagcagaaagcgggagattggtgcattatgatatcgtgtcatcggatttttaccgtacgataatggagaacgaatgtacaagaattaataaaaagcaattaaatgttcattatatgaacacaagcccaatttcgtactgggagaaaaatgaaaaatataatacatttttatatttggctgacatagtttgttctatgctggattattacaaaaagggttcgagtccggcagagtggatggattcttttgccgaatggggaaacaaatattttggtgatgatcagataatcttatttgggtatgatgatatagatgacaaatacatggaggctgtagatgcagtaggacagggagagtattttcatgcgctggatattatatatgatgcggaatgtagtggaagtgaatttgagaagcactacaaagattattggtttccaaagcttataaaaaagatacgaataacagcaactgtggataatttatgcagatcgatctcagatctggagagttttacatatcgaagtaatcttgatcagcagaaacttttgtggatttttgaggaaatcaaagctatcgtcgataagggagattttggaaagaaatatcatacagatcaggttatgtttgatatgtgtaatgccggtattgctgtgtacaatcatatcggagattttgggactgcaaaggaatactatgatgagtgcatgaaacacactggggatgtggatctggtaaagatacttcgtgcatcaaataaaatggtggtctttcttgacgatgcttttaggtatggtgacgcgacagaacgtgccaggaagaatgttgaataccaaaaagctttgcacgatataaagagtgagatttgtccggaaaagaaagatgaagacttgaactatgccatatcgctcagtcaatttggacaggcgcttgcgtgtgaaaaaaattctgatgcagagagtgttttcctagagtcgttgcggcatatgaggaaagggactgccaattatcagattactctttcatatttactccatttttatctggatatgggaatgacagattcttatcgagaaaaaacaaaggactattttggaagtgaaaaaccaaaggaacagctgaaagaattgctgaagttatcgggaaaggatgatagtatagttactttcaaatttgcaatgtatgtctatttacgtgcactttgggtattacaggaaccgcttactgattttatcagaacaagattagaggacatacgtgagactcttgtaaagaagaaaatgagtgaacatatggttggacatccgtgggagttgatttataaatatctggcatttcttttttatcgtgatggaaattgtgaagctgctgaaaaatatattcataaaagtgaagagtgcttggaaacacaaggactgactatagatgcgattattcataatggtaagtatgaatatgcagaattgtcaggtgacgaggagatgatggcaagagagaaagcgtactttgatgaaaaagggatagatagaaaaaatgtttgtacttttatgtatcattgatgtttaataagatttgaccgaggagtgacaggtaatcgccggtatatctggtattacctgtcattttttgatgaaataagctactttttgcctaaaaaacgaaactgttggtgttttatgatgattgtgtcaacaaaagagagcaaaagaagaggagaaaagtaatgtcaatgatttcatgtccgaattgtggtggagagatatctgaaaggtcaaagaaatgtgttcattgtggatatgtgttagtcgaagaagctaaagtagtgtgcacagaatgtggaactgaggtagagagtggcgctgctgtatgtccgaagtgcggctgtcctgtaaatgatagtgagacgcctcagaaagttgaagtgactagggtaaatgtatcttccgtaatcagcaaaaaagtcgttgtaagcatactgatcgcagtgattacaattgcaggttttttctatggagtgaagtattcgcaggaaaagaaagcaattgaagagtcagtaaagcagaaggaagactatcaaagtacgctagagcttgcttcgctaatgatgcttcaaggagcttcggatgcagaaacttgtgggaatttggttaggaaagtgtggagcaactgcatttataaggagagggatgaagaaaccgacaagtatacgtgtgatagcaggggtgcaggatggttttatgatgattttaatgatgcattaatggctctttacagtgacagcagttttggcaagaagataaatgaaatcaaaaacggtcaggaaaccgttgcggcgatgatgaaagatctgaaaaatccgccggatgagatggcagatgcctatgaggatattcaaaatttttatgtgtcctatctaacgctgacagaaatggttgtgaatccaactggaagtttgagttctttttcatctgatttttccgatgcggatacggaggtgtccaatgcctatagccggatgaagttgtatttagattaaactattgaggaaaaaatggaggtgctttaatgcgggggagaaactgtggagggtcatcaggcgacggactgctggtacttctcgtactgcttgtccttttttataaaatcatgccattcataggtttatggattttaatttttggtgatgctgaacgtaaagatctgggtatgggtatgattattgtcgggatagttctatatgtattattagaggttttttaatgtgagtttctgtggtaaactataaaagtacaagcttttgcgccgcaccgcataaatagcggatttatgaccattatttggtgaaaaaaatggtgtacacctgtgtttttttgttttgcgccgcaaaatgcgccacggaaccgcatgcagagcaccctgcaagagacagggttatgaaaacagcccgacatagagggcaatagacacggggagaagtcatttaataaggccactgttaaaagttatgaaaacagcccgacatagagggcaatagacataaagaccaaaaacaggtcatctgcatactgtgttatgaaaacagcccgatatagagggtgtgagagatatagttctcgtcacagtgcagaaaatgacctattatgtgccgaaaaacaaaatgaaaaaagaatggaaaggcgtatttaatgaaatgctgatctgttgatttgaattaacaaaaaaaggtcgccccacggatgacaaaaacatccgggggcgaccctttt

SEQ ID NO: 65 - DNA, 6098 bp, Artificial Sequence
  source: /note="Description of Artificial Sequence: Synthetic polynucleotide"
tactgtgtgcataagtcttccttagatccataggtacagcagttttatttattagccttagaaaatggaaaatagagcttataaatgatatgatatttatgaataaaatgattgcattctcgtgcaaactttaaatatattgattatatcctttacattggttgttttaattactattattaagtaggaatacgatatacctctaaatgaaagaggactaaaacccgccaaaagtatcagaaaatgttattgcagtaagagactacctctatatgaaagaggactaaaacttttaacagtggccttattaaatgacttctgtaagagactacctctatatgaaagaggactaaaacgtctaatgtggataagtataaaaacgcttatccatcatttaggtgttttatttttttgtgattatatgtacaatagaagagagaaaaaaatcattgaggtgaaaactatgagaattactaaagtagaggttgatagaaaaaaagtactaatttctagggataaaaacgggggcaagttagtttatgaaaatgaaatgcaagataatacagaacaaatcatgcatcacaaaaaaagttctttttacaaaagtgtggtaaacaaaactatttgtcgtcctgaacaaaaacaaatgaaaaaattagttcatggattattacaagaaaatagtcaagaaaaaataaaagtttcagatgtcactaaacttaatatctcaaatttcttaaatcatcgtttcaaaaaaagtttatattattttcctgaaaatagtcctgacaaaagcgaagaatacagaatagaaataaatctctcccaattgttagaagatagcttaaaaaaacagcaagggacatttatatgttgggaatcttttagcaaagacatggaattatacattaattgggcggaaaattatatttcatcaaaaacgaagctaataaaaaaatccattcgaaacaatagaattcaatctactgaatcaagaagtggacaactaatggatagatatatgaaagacattttaaataaaaacaaacctttcgatatccaatcagttagcgaaaagtaccaacttgaaaaattgactagtgctttaaaagctacttttaaagaagcgaagaaaaacgacaaagagattaactataagcttaagtccactctccaaaaccatgaaagacaaataatagaagaattgaaggaaaattccgaactgaaccaatttaatatagaaataagaaaacatcttgaaacttattttcctattaagaaaacaaacagaaaagttggagatataaggaatttagaaataggagaaatccaaaaaatagtaaatcatcggttgaaaaataaaatagttcaacgcattctccaagaagggaaattagcttcttatgagattgaatcaacagttaactctaattccttacaaaaaattaaaattgaagaagcatttgccttaaagtttatcaatgcttgtttatttgcttctaacaatttaaggaatatggtatatcctgtttgcaaaaaggatatattaatgataggtgaatttaaaaatagttttaaagaaataaaacacaaaaaattcattcgtcaatggtcgcaattcttctctcaagaaataactgttgatgacattgaattagcttcatgggggctgagaggagccattgcaccaataagaaatgaaataattcatttaaagaagcatagctggaaaaaattttttaataaccctactttcaaagtgaaaaaaagtaaaataataaatgggaaaacgaaagatgttacatctgaattcctttataaagaaactttatttaaggattatttctatagtgagttagattctgttccagaattgattattaataaaatggaaagtagcaaaattttagattattattccagtgaccagcttaaccaagtttttacaattccgaatttcgaattatctttactgacttcggccgttccctttgcacctagctttaaacgagtttatttgaaaggctttgattatcagaatcaagatgaagcacaaccggattataatcttaaattaaatatctataacgaaaaagcctttaattcggaggcatttcaggcgcaatattcattatttaaaatggtttattatcaagtctttttaccgcaattcactacaaataacgatttatttaagtcaagtgtggattttattttaacattaaacaaagaacggaaaggttacgccaaagcatttcaagatattcgaaagatgaataaagatgaaaagccctcagaatatatgagttacattcagagtcaattaatgctctatcaaaaaaagcaagaagaaaaagagaaaattaatcattttgaaaaatttataaatcaagtgtttattaaaggtttcaattcttttatagaaaagaatagattaacctatatttgccatccaaccaaaaacacagtgccagaaaatgataatatagaaatacctttccacacggatatggatgattccaatattgcattttggcttatgtgtaaattattagatgctaaacaacttagcgaattacgtaatgaaatgataaaattcagttgttccttacaatcaactgaagaaataagcacatttaccaaggcgcgagaagtgattggtttagctcttttaaatggcgaaaaaggatgtaatgattggaaagaactttttgatgataaagaagcttggaaaaagaacatgtccttatatgtttccgaggaattgcttcaatcattgccgtacacacaagaagatggtcaaacacctgtaattaatcgaagtatcgatttagtaaaaaaatacggtacagaaacaatactagagaaattattttcctcctcagatgattataaagtttcagctaaagatatcgcaaaattacatgaatatgatgtaacggagaaaatagcacagcaagagagtctacataagcaatggatagaaaagcccggtttagcccgtgactcagcatggacaaaaaaataccaaaatgtgattaatgatattagtaattaccaatgggctaagacaaaggtcgaattaacacaagtaaggcatcttcatcaattaactattgatttgctttcaaggttagcaggatatatgtctatcgctgaccgtgatttccagttttctagtaattatattttagaaagagagaactctgagtatagagttacaagttggatattattaagtgaaaataaaaataaaaataaatataacgactacgaattgtataatctaaaaaatgcctctataaaagtatcatcaaaaaatgatccccagttaaaagttgatcttaagcaattacgattaaccttagagtacttagaactttttgataaccgattgaaagaaaaacgaaataacatttcacattttaattaccttaacggacagttagggaactctattttagaattatttgacgatgctcgagatgtactttcctatgatcgtaaactaaagaatgcggtgtctaaatctttgaaagaaattttaagctctcatggaatggaagtgacatttaaaccactatatcaaaccaatcatcatttaaaaattgataaactccaacctaaaaaaatacaccacttaggtgaaaaaagtactgtttcttcaaatcaagtttctaatgaatactgtcaactagtaagaacgctattaacgatgaagtaattcttttaaagcacattaattacctctaaatgaaaagaggactaaaactgaaagaggactaaaacaccagatgtggataactatattagtggctattaaaaattcgtcgatattagagaggaaactttagatgaagatgaaatggaaattaaaagaaaatgacgttcgcaaaggggtggtggtcattgagtaaaattgacatcggagaagtaacccactttttacaaggtctaaagaaaagtaacgaaaacgcccgaaaaatgatagaagacattcaatcggctgtcaaagcctacgctgatgatacaactttaaaaggaaaagcagtggattcttcacaaagatactttgatgaaacgtatactgttatttgtaaaagtatcatagaagcattagatgaaagcgaagagagattacaacaatatattcatgattttggagatcaagtggattcttcacctaacgcacgaattgatgcggaattactacaagaagcaatgagtaggttagctgacataaagcggaagcaagaagcacttatgcaatccttatcttcttctacagcaacgctttacgaaggcaagcaacaagcgttacacactcaattcacggatgcgctggagcaagaaaaaatattggaacgctatattacttttgaacaaactcacgggaatttttttgactcatttggagaacttgtctatcgaacgggacaagcagtgcgtgaattagctaataacgtcacattcgagagccaaacaggaagctatcattttgataaaatagatgcttctagattccaaactttgcaagaaatgttgccaaaggcaaagaaaaaagcatttaattttaatgactaccaaataacatggaatggcaccacgcaccttttatggaaaaatggtaaagtggatgcagaagcaaccaaagcttataacgaggcgaaactgaatggaaagctaccaaaggaaggtaatgtagcaacacaagatgcagaactattaaaaggcattttggcttcactgaaaaacaagaaagatcctatcactggagcagatataagcagtgtgcatgtattatctatccttagcgggctcgcattctcctatacagctgggaattataagggaagaaaacttactgttccaaaaagtttcttagacaaattaaagaaaaaccgaaaatctaaagtacctaaactatctagtttatcagaaaaacaacaactaaaactcgcaaataaatacaagaaaaaatcacctattccaattccagatgatgctaaaatcaaagctcagacgaaaaaggctggttatgaacaaatatcttataaatggaaagagaatgggataacctttgaagttagatggcatactaggacaccaggtgcaccaaaggaacaaggaaatacgtttgttatagaaagaaaaattcagggtacagcagaagggaaaacaaaagttcaacaaatattggttggagataataagtgggtgagtaaaagtgagtggcaaaaggctataactgataagaaaaatggtgtaagtacctcggagcaaaataaaatgttgtctgatggacattggaaagaatagaaaggagcaaaatgatggaagattattataaaggttttgagggatatccagagatagatttttatacgtatatagatgatatgaaattgggtatagcaatgtgggaaggatactttgacaacattatgaaagaaattaatccaagtaacggaagatggacttcattagcgtattattatcatttagatgaggggtggtatgatgaaagtccttgggaaataccaagtaatacagaagcattagaattattggaaacaatccatatatctaatctagatactatcacacaagagatattacttaaattaataaatttattaaagaagaatataaatagacaagtttatattgaatactcataaaaaagatgattatgatatattatagaacaaacgaacaagccccaaatacgaggtttgttcgtttgttttcaatataattatttgccaccaagtgagatattacggttttaaatagcttatttgacgataccaaaccctgataagagaaagaagaaagagaaagctggtgtagttgttttaagtgaactagataaaaaattaatagcaaaacttgaaaaagatggtgtgaaaatatcaaaagaagatgttataggaataaaataattgccagatgatgagaaatcgtttggctggaaaaaggaaatccatccgctggatttgagcatattcttattgaacatggtgaacaatttgctaaatagggaatttcaaaagctgagttacctgattttttgatgactgctttagaaaaggaaa

SEQ ID NO: 66 - DNA, 6222 bp, Artificial Sequence
  source: /note="Description of Artificial Sequence: Synthetic polynucleotide"
attctttaaaaatatctaataatttatttactatatactctaatacatcttttaacctatctaaaacatcatcacctacaacatcccaaaaatcatctaaaaagttaaaaaaatccatctttatcaactcctatatctattttttattgtgtaattcctgagttacaaaaccattataacacgtattacacacgtagtcaatacttcaaaaaaattttttgtatatttttttgaataagtaaataaaaagagctgtgtagctctttattaaaatcaatatttttattttgttaacaaacttagacaacattaaatttagaaacctatatatatttcagtacttttcatttttaggtagtctaaatcagaaatggttttgtctaaatgatgtatgtaagttttagtccccttcgtttttagggtagtctaaatcagaagtcatttaataaggccactgttaaaagttttagtccccttcgtttttagggtagtctaaatcccatccaaattatgggataatatgttactttttattttaatatttgattatttattgtttttttactgatttagattacccctttaatttattttaccatatttttctcataatgcaaactaatattccaaaatttttgtttcttttcttatgatcttttctccgatagttatttctccagataagattttcatttttttgaattgatcttctgttagaattaatgttcttactgatgaattttctggaactatcattgacaactgattttcataggaaattattttttcttttgtgctagaacttacaatgtatactgatttttgtacctgataatatccttttcttataatttcttttctaaattttgcatattcttttttttcttttcctgtttgcattggaaaatcatacattagaatccctacataattagtactcataatcctctatccttaactcaggaatttctacttctgacatttctcctgtaaaataatttctaatattatctaaaaaataatcaatcacttgagccaattcatattttttatttttccaataaactttttgtgttaataccaataacaatttttgtcttaatgatttattcaaacttacttcttcctgttgattaaaatatacgatataatctaccattggacgaaatatttcaataatatcatctgcaaaattataattattaaattgtgaactgtgatgtattcccaaacttggatgaaatcctttagccacaatttttgaagagattaagcttctcaaaaccatatacccataatttaatgccgaatttgtcccgtcttcaccaaatctcttaaattttttcccaaaaagttcaccaaaatacattcttgcagcaattgcttcctgatgttccgcttcttttccttttaatctaatattattttcatatgcttccaacttatatgatacttcctgagattttttcaaaaactgcaataaatttctttgattttctatttttctcattacaatttttctccagatttcttcttttttatcgtcaatccagctcacttgctcattaattcttgttgttacttgaaaatgattatacagtcctaatgaatgtaaaactggctgatgtttttcattacaaattatcagtggaatattatgttctgataatcttaactgtaatattccgctaattttacatctgcaattttcaactacaattgccatgatatcatttaaagatactttatcagccttattttcatcatcttcatttatcatcacaagctggttatttaaaactgataattcattgactcttgttacatggataatattagacatttttattactcctttactctaaagctttatattcaaacataactttcacaagttcacacaattcttctgaatttctatcagtcattaattttttcttttttaaatttttcaaatgtacaattttttccgattctaaagtctgaatttctattttcttatctgctcctattttaaatgttgctacaaaaccatattcctttaatatatccactattgatttcataattgcatttttaagttttctatcataagaaagtaattttcttaaattttccagcacttctaaaagtgaaatttcagcatgcggaatatagttaaaatgtgcaatatagtttcgtatatacaaatcttttttctcttgttttaatttttttacttttttatcagaatagatgcttcttttttctacattatctttgtataattctttataaaaatttatatatttttcaacaatttgcccacttttatattttacatttttactgttatcaaaattaaatatttcttcaatataatgattttcaggaaattcacctttcaatctaaatcttaagtccctttcccagatcgaagtatatcccacaagtctgtggagtatttttaataacaagccttgcaacaagtttaattcattaaattccactttatttttcaaatgagtatatttttgtatatttccaattgctttttcatattctttataatcttcatcattaaatttttcatcttttttaggtcttgcatattttctatgtaaattttgctgcattgtataatttttttctatttcattttttttattgctgtattctttcaattcttttaaacttattttatacttcgctttatcagctattttttcaagtaaatttaacatcccatatttttttatattataaaaagctctatgctttataatattttctccatcaaaatatattttatttgtgtcaaatttcttcaattctttcctatcttttattttattttcattaaaatctaaaaattttccaatttcattcgcttctaattcaaaatcttctgttactctattattatctaaatttaaaagatttataagttcaagttcatctgaaaaagtttcttctttatttgcactctgatatttttcaagacttcccttcaaattagtcaattctttatgattaagcaattttaaaattaaataaaacatattcaaattttcagtgtattttaatatctttcctaattttatctctcttacaaattcatttatttcatgtggaatttctttattcctattatgtttttcataattttttaaaattttatcatatttttctttattatctttttttatttttattttagaaaatatatcattattatcattgttattattactttctatatattttaaattatttttattcaaataatctataaaaccttttaaaaatatttgttgtataaaatcaatgtatgtatttttttcttctttatcttgattattaatcatctccctactttgtataatagcaagatattctactggtacagttttttctatattttcaaatttttgatatttataatgtcctgttttttgatttctttgtttatttatttttattacttcattagttattttaaaaaaaactttactatttttaacaaatttattaagaaattcaccataataaatatttttcaaaagatatatttgagcatctttttcttctttatccttaggaacactccaaaaaaattttaaagtatttcttaaatcttctattttattatataatttcgtaaaagaaggaacaaaaggaatattcttatttacaaaattaaattttgtattttttaaatatttaattatcacatccttttcataataattaaatacatttgcactatttaactgcttaaatatcttcaatttcaattttttctcatttatttcattttgaaacattttttttgaaatttcagaaggagctatatttttaaatgcaaatatatctttcccttctaattccaaattaaaatgcacaatcccatgtctaatactgctaatagcttcatcaatatttgcaaaaaaatcttctatctcatttttattatccatattaaaatcataactatagaacatttttaaattttcttttacttcattttgcttgttttcattatatattttatcaacttctccagaaacatatttttcttcgcccttattattttttacagtttttcctctcattctacctgtaatatcattctcattttcagtttcaagaatatttctcaatgaaaaatatgcaaccgaagaaactccaattatatttcgtaaaaatgcttcattttgtctattcctagcaataaaatcacttgttgcaatctctccaacttgtaaataataattgtatttcccacaatttcttacataagtatccaatttatttagtaatttgttttcaattaatttttttaaattttgatattcaaatattctcttaattttatcgttacttatgttactcagtcttttatacacataatttttcaaaagctgactcatttcaatttccacaaaatgacaaaaagcatattttatatttttatcattaagttcttctttatccaaataatatttataaaacacttgtgatttttttaattcactcatatccggaattttttcaattaattcttttatattatttacattttgtatttcttcgtaaataattttagcaaaattttctttatcattttttcttccaattattttgtgatagtattctcttattttatatttttcatgtttttttgaattttctattaaaaaaaataacttctcaatatcttcttttttatacaatttatcaaatgcttcctgtacattatttatataatcattacgctttgctgattctctataataatcataaataatatttcttttgctcttccctccaactttttcaacattattttcattaattttctgataattagccttattttcttcaaatgaatattttaaagaatttatcttattcaattttgcctcaacatcttttctaaatatttctaattcttcagagttcacatcttcatttaacaatattttctttaaaactgaaaaactatttttattttttaaatcatattctgaaatatcttcttcagaataatttttatcctgtactgcatttttctctttcctattctttaaatacagaacactatcttttagatgcaatactttatttgaaaaaaacttttttaaattttctcttcttattctattttcttcttcacttgcattatcaggattttttatatatatatccagtcttatacttaaaagctctgacaatctctcactagtcctattttcttcgctcgtactttttactaattttccctcttcaatatattttttatgcgaaattccatcaacttttgtaactttcatatataaaaacctcctaatatctatattttttactcaatacctaattcttttttcaatgctttttgtaaaatttgtgaaaaattcagatttttttcctgtgccaatatatctaaccaaacaggaattgttaaagttttctttttaagtgcatttgtaacttttgccacttcatacactggatcaacagataaaatatacaaatactgattttctttcagtttcacatcctccacttttgaaggctcaggaaatttttttcttacatccaaaaaatcagccaaatgcagacccaatgtctctctcaaattggaaacagcctcctccatgctatctccaaatgtagcataataatttatctctccatcttcaaacttatcaaaatcaacaatacaaccataataagtcccatcttccttagttaccactgctggataaaatacatccattttaattatctccaatctataccacgtgttaaatacgtgtttaaaaatatttataaaattttttagcatctctgctaaaataaaacaattatttcaaatttttctattccttaatcactcattgttagtgattctttttttacttggacaatttttcatttaatttcttcaatttttttaaaatcacatttttttaatattccttatttaattgcaaattttcattacttttggggtgctctaaatcccatccaaattatgggataataatttttagtgaaagcaagaagggactagaatttaatcccaacttgtttttcaatacttcttaatgttcctacaggtatatcttttgaatatggtactgtgaccacaccttccacacctgggatcatccattgataatgactacctcttatacgcacaacttttccgcctaattttctaaatcttttttcgat

SEQ ID NO: 67 - DNA, 6337 bp, Artificial Sequence
  source: /note="Description of Artificial Sequence: Synthetic polynucleotide"
ctttctatctttttcaaataaaattaggctctagttagcctaatcgcataattatttattatagtataattcttattttttttcaacctaaaaatttaaaacatctccaaaaattttcgtttcagaacaaccaagcaaccatattcaaaaaacaataaaaaatgagcaagaattgaaattttattctcactcagaagttatttttattaaatatcacttttcgatattggggtggtctatatcaatttaaaagacagaatagataattctttagagttttagtccccttcgatattggggtggtctatatcagaagtcatttaataaggccactgttaaaagttttagtccccttcgatattggggtggtctatatcccatcctaatttcttgctgatgagatatttatttctaatttttctattttgtctttattttcaatactttcaatcctatttttctctttattaataatatagaaccaccctatactattataccatattttttgatttttcaaaattccaatattttgttttgtgaaattttttctcccattgtcacttctcctgcaagtaccttcattttttgaaactgatcttctgtcaggataatggaacggattgatgaattttctggagcgagcattgataactgtttttctgccagttcgattttttcttttgttttcgacctcattatatataccgatttttgaagctgataatatcccttttctatcaattttttcctaaaagtcctatattcaaatctctcaacatctgtctgcataggaaaatcatacataagcagaccaaaatactcaatactcatagtccatcacgctcaatgtcggaattatcacttcttcatcttttacaaaataatttcgtatactatccaaataatagtctaccgcttggaaaaaatcatatttcttattgttaaataataccttctgctgtgctacaagaagtattttttgccttatttccttacttaatttcacttcattcaaaatatccttgtacatataaacaagataatccaccataggacgaaaaacctctattatatcatcagaaaaattataggcattaaactgtgacttatgatgtaatcctaaacttggatgaaatccttttgctacaatctttgatgatattatagctcttaaaatcatatatccataattaagtgcagaattcactccatcttcatcaaatcttttaaaactattactatacaattcctgaaaatatatccttgaagctattgcttcctgatgttctgcactcgcatcatcttttttcaagttttccttatatgttttcagtctttcaatggaaatatcacttttttcaagatactctaacaatgctctttgattttcaatcttattctccactatcctgctccacaatttttcctttttctctttttcccactcaatctgctcatttattcgtaaagtcacttgaaaatgattaaataatcccagcgaatgaatttcaggctgatgtttctcgttgcaaataataatcggaatgttattttccaccagcctcaactgcaaaatcgcactaatcttacaatagcagttttcaataactatcgcagatatatcattcaaagaaatcttatttttctcatcattattgtcttcatcaaccattataagctgattattcgatattgacaaatcatcagcccttgttatgtgaattatattgggcattttaatcatactccttataaatttcattcttataacgtatcattcgtattttctatttttgttaaaagttctattatcaagtttttaatataatcagaattataactttctaattctaaaacagaaacttttttaggtttcattaatctttcaagtatatcattattaccgataagtttaaattttttctttaattcatcataatctaaattcacatcttttttaaatacttcaaatacacttgcataagttgaattattataacgtgtactatatgataataaattagaaactctatcaatttgttctgcaatactgtaatcagcaaacggatttcttacaatatagaaatgtgaaatatagtttctaatactttcattttccggcttattaatttcagaattttcagacaaatcaattccaaatccataacatattttctcaaattttttataagattcttcatcaaaaaatttatagtatgctgttgttgtataaaagccatcagatccattacgcttaggataagctctacttattccagtattgtagccacttaacttaataattcctaattctcttagcccatttacaatatagtgcatatctctttcaaatctagccatttgaatagcaagtttccaatttatatctatcaaataactttctattttattcaaataattaaattctaccaaatctctaatttttttgtattcagaaactctattataatctttttcaaatgatttatagtttttattttgtatattttttgcaaaaaagtcatcattttctttcaatttttttatatacttctctttgtattctttagaatatccatttagtttatcatttagatttttcaatattgcatcaatttcagatattttattttttctaatatttttaccatcaatattaaataaaaattttgcatcagccattttaatatcatttgaaattaatccataaattttatcaaaatttggatttccaatatttaaaaataaattctttttataaatatataattcattcttacgttctttaggataatatatttcttgaaatttattttcattctctgattccatatcttctattaaattatctatttcttttttgtatttttttaaaaaatcagaattaaatattattctacacaatattttactctttatttcctgatctttatcttttatatactgatcaaccttttttttcaaatcctttttatttatgtttgataactttctttgttcatcttgtaatatattcgattttttatctatctcaaatttagtttcatcatcaaaaattacaattttttctaattttttctctaaaacatcacaaccattaatatcatctttaaattcagttaatatattattttttatatcctcataataattattaaaaatttcttttttagtttgtattttaaaatcatcaaagtctttttctatctctttcattttttgaataaattcttctaaattaagattccaattttcagttatacattcatttctcaaagtatttaattgcattatttcatctaaaatatctataatattttgatattctgaagtatttaaccaaactgatgttgcaaaaaatctatttctaattttatttataaccgcattactatttaacagtgcaaatattgaaattatatattcaaaatcatcatttattactatagttttatcactagtctttacagttattctttcgtaagttttattatcattaatgtcttttatttgtttcttaatttcttgaatattcattttaaaatctgaaaaatcaaaaagttcctcataattttttctcaaatatccaatataacattctattacttttttctgatattttttaatagctttattattaccttttgaagcagaaatctgagcatttttataataattttctataatattttcatctatttcatcaatgtttcctaaagttttctttaattcttgtaaaaatatattcttactttcattttcttctaaatcatcttctaaaattaatttcttatacaattctttattcacatatattaaagcatttaatactattttttctgtttctatagtatcaaatggttcattcttaggattattcctatataaatttaatatttcaggaagtactttagaaaaggatggtaaatatttaatatcattattattttcttctgaaattttaatatcatttattttagtaattatattttttttatctttaaatactacatctaaatttaatgcttttgacacttcttcatctgatatttttaaattttgaattatatttatgactttattatagtcatcttgcgttccttgtaaatctctttccttgctaatcgcatgtaatatcctgtttctttcatttgttcctatctttgtaaatttcctaataaaattatttgtaatgttatttttattatctataaaatctaagtctcttattatttttatttttgaatttaaaatttttttatcaagtacgtaatttttttctcgatctcctccaaagaaatctatattttcatcattatttatattttctctagaaaaaatcttatttaattccatattggtagaagcaaaaaaagtaatcaattctaaatccaattcctctttagcgtgaagtctagaaaaatcatcagtatttactgttgtcatatctatatcattatgtcttaatttccctaaatacataatatgctctaacgtatattgcttaactctttttaaaattttttcagataatatactttcatttaaaattttttctatttctattttttccattttctttaatctgactttttgttcatttaccaatattttttcaattcttcctttcaaatatcgatatatgattttatatagttctttttcttcatcagatttctttgaaaattttttcgaatcaaaattaactttataatgttttttaaatattccaaaaatttctgtatcacaatttcctttttttagttctttttctaatttttttattaattcatctattttaaattctgctaaaattttttctattttttcttttatactattattttttatattttctacaaaaaattttacaattttatcttttttattttctctttctattttaaatttttcgtgcttatctaatagtacataagattttatatatgttctatttcttctcttttcaagaaattcattattaactttttttactttttcaattcttttagtaatattccaaaattctaactcttttataacaaaatcagctatatcttctactgttaaatctacatttatatttaaaattttttcaacaagcatttttttatttttagatttctttttatcaccaccaacattaagataaaattttacaaaacccagaatttctaaattactttttattttttctcttatttccataaaattagtcaaaataacatctattttatcatctttcaataatttttctcttaaatgttcttcataatatcgattttcaaatactttttctgtttcattttcaattattttttctataatcttatataaactcatgttaatatttttaaaaatttcgtaaattgatttttttgtttctaattcatcattttctattattcttaatattattgaacaatcatttagtgttttattagtatactcatctctgatatctatctctatttcttcttcattctcttgtctctttatttctatttttttatcatctttagttattccttgcctaattgcttcatctattattttcttttttgtaatccccaatgctttcaatttctcagattttccatatgcttctatatataatacaacttcttctgtttccaaaaaatcatcattattttctattcttatgattccttctttacctttcaacttaaatagaatatttcctgcatgaaattttcttgtaaattctttaagaatattatcattttttttgtaattaatatattttctaataaatttattattatcaattttttctttattattattttcattaatatttaaaatgtatttgtttccatcatagttccttttaacttttactttccgttttattttaaaatcttttttatcacgaacttcataccatctcttatgtccaaataaatttcccattccaatctcctcgtttctactttaatctaataaaatatttttaaattaaatcaattttacatctttctaatcaaaaatacaattttccatttttagtataccacatcaatattaaatctcaaaaaaataaggagccgtcaaacatagctccctacttctatttactcataatccccatctatccttacttttcgtaaaatcaatccttctttcgcctttagatccaacttaattttcccatttgaacctgttctaaatgttctgccttctgttaccaaatcaataaatctttcatcctgataatttgtttcaaattccacattttcccagctgttaaacgaattatttattacaacaataattaaatgatcctcgattactctttcatacacaattattt

SEQ ID NO: 68 - DNA, 173 bp, Artificial Sequence
  source: /note="Description of Artificial Sequence: Synthetic polynucleotide"
aatatggattacttggtagaacagcaatctacgccagtgaattcgagctcggtacccggggatcctctagagtcgacctgcaggcatgcaagcttggcgtaatcatggtcatagctgtttcctgtgtttatccgctcacaattccacacaacatacgagccggaagcataaag

SEQ ID NO: 69 - DNA, 173 bp, Artificial Sequence
  source: /note="Description of Artificial Sequence: Synthetic polynucleotide"
ggccagtgaattcgagctcggtacccggggatcctctagaaatatggattacttggtagaacagcaatctactcgacctgcaggcatgcaagcttggcgtaatcatggtcatagctgtttcctgtgtttatccgctcacaattccacacaacatacgagccggaagcataaag

SEQ ID NO: 70 - DNA, 56 bp, Artificial Sequence
  source: /note="Description of Artificial Sequence: Synthetic oligonucleotide"
ccaccccaatatcgaaggggactaaaactagattgctgttctaccaagtaatccat

SEQ ID NO: 71 - protein, 1434 aa, Leptotrichia shahii
MGNLFGHKRWYEVRDKKDFKIKRKVKVKRNYDGNKYILNINENNNKEKIDNNKFIRKYINYKKNDNILKEFTRKFHAGNILFKLKGKEGIIRIENNDDFLETEEVVLYIEAYGKSEKLKALGITKKKIIDEAIRQGITKDDKKIEIKRQENEEEIEIDIRDEYTNKTLNDCSIILRIIENDELETKKSIYEIFKNINMSLYKIIEKIIENETEKVFENRYYEEHLREKLLKDDKIDVILTNFMEIREKIKSNLEILGFVKFYLNVGGDKKKSKNKKMLVEKILNINVDLTVEDIADFVIKELEFWNITKRIEKVKKVNNEFLEKRRNRTYIKSYVLLDKHEKFKIERENKKDKIVKFFVENIKNNSIKEKIEKILAEFKIDELIKKLEKELKKGNCDTEIFGIFKKHYKVNFDSKKFSKKSDEEKELYKIIYRYLKGRIEKILVNEQKVRLKKMEKIEIEKILNESILSEKILKRVKQYTLEHIMYLGKLRHNDIDMTTVNTDDFSRLHAKEELDLELITFFASTNMELNKIFSRENINNDENIDFFGGDREKNYVLDKKILNSKIKIIRDLDFIDNKNNITNNFIRKFTKIGTNERNRILHAISKERDLQGTQDDYNKVINIIQNLKISDEEVSKALNLDVVFKDKKNIITKINDIKISEENNNDIKYLPSFSKVLPEILNLYRNNPKNEPFDTIETEKIVLNALIYVNKELYKKLILEDDLEENESKNIFLQELKKTLGNIDEIDENIIENYYKNAQISASKGNNKAIKKYQKKVIECYIGYLRKNYEELFDFSDFKMNIQEIKKQIKDINDNKTYERITVKTSDKTIVINDDFEYIISIFALLNSNAVINKIRNRFFATSVWLNTSEYQNIIDILDEIMQLNTLRNECITENWNLNLEEFIQKMKEIEKDFDDFKIQTKKEIFNNYYEDIKNNILTEFKDDINGCDVLEKKLEKIVIFDDETKFEIDKKSNILQDEQRKLSNINKKDLKKKVDQYIKDKDQEIKSKILCRIIFNSDFLKKYKKEIDNLIEDMESENENKFQEIYYPKERKNELYIYKKNLFLNIGNPNFDKIYGLISNDIKMADAKFLFNIDGKNIRKNKISEIDAILKNLNDKLNGYSKEYKEKYIKKLKENDDFFAKNIQNKNYKSFEKDYNRVSEYKKIRDLVEFNYLNKIESYLIDINWKLAIQMARFERDMHYIVNGLRELGIIKLSGYNTGISRAYPKRNGSDGFYTTTAYYKFFDEESYKKFEKICYGFGIDLSENSEINKPENESIRNYISHFYIVRNPFADYSIAEQIDRVSNLLSYSTRYNNSTYASVFEVFKKDVNLDYDELKKKFKLIGNNDILERLMKPKKVSVLELESYNSDYIKNLIIELLTKIENTNDTLKRPAATKKAGQAKKKKGSYPYDVPDYAYPYDVPDYAYPYDVPDYA

SEQ ID NO: 72 - RNA, 56 nt, Artificial Sequence
  source: /note="Description of Artificial Sequence: Synthetic oligonucleotide"
ccaccccaauaucgaaggggacuaaaacuagauugcuguucuaccaaguaauccau

SEQ ID NO: 73 - RNA, 56 nt, Artificial Sequence
  source: /note="Description of Artificial Sequence: Synthetic oligonucleotide"
ccaccccaauaucgaaggggacuaaaacuuucuagaggauccccggguaccgagcu

SEQ ID NO: 74 - RNA, 56 nt, Artificial Sequence
  source: /note="Description of Artificial Sequence: Synthetic oligonucleotide"
ccaccccaauaucgaaggggacuaaaacaguaauccauauuucuagaggauccccg

SEQ ID NO: 75 - RNA, 56 nt, Artificial Sequence; identical to SEQ ID NO: 72
  source: /note="Description of Artificial Sequence: Synthetic oligonucleotide"

SEQ ID NO: 76 - RNA, 56 nt, Artificial Sequence
  source: /note="Description of Artificial Sequence: Synthetic oligonucleotide"
ccaccccaauaucgaaggggacuaaaaccaugccugcaggucgaguagauugcugu

SEQ ID NO: 77 - RNA, 56 nt, Artificial Sequence
  source: /note="Description of Artificial Sequence: Synthetic oligonucleotide"
ccaccccaauaucgaaggggacuaaaacgcaugccugcaggucgaguagauugcug

SEQ ID NO: 78 - RNA, 56 nt, Artificial Sequence
  source: /note="Description of Artificial Sequence: Synthetic oligonucleotide"
ccaccccaauaucgaaggggacuaaaacaagcuugcaugccugcaggucgaguaga

SEQ ID NO: 79 - RNA, 56 nt, Artificial Sequence
  source: /note="Description of Artificial Sequence: Synthetic oligonucleotide"
ccaccccaauaucgaaggggacuaaaaccgccaagcuugcaugccugcaggucgag

SEQ ID NO: 80 - RNA, 56 nt, Artificial Sequence
  source: /note="Description of Artificial Sequence: Synthetic oligonucleotide"
ccaccccaauaucgaaggggacuaaaacgauuacgccaagcuugcaugccugcagg

SEQ ID NO: 81 - RNA, 56 nt, Artificial Sequence
  source: /note="Description of Artificial Sequence: Synthetic oligonucleotide"
ccaccccaauaucgaaggggacuaaaacugauuacgccaagcuugcaugccugcag

SEQ ID NO: 82 - RNA, 56 nt, Artificial Sequence
  source: /note="Description of Artificial Sequence: Synthetic oligonucleotide"
ccaccccaauaucgaaggggacuaaaacaugaccaugauuacgccaagcuugcaug

SEQ ID NO: 83 - RNA, 56 nt, Artificial Sequence
  source: /note="Description of Artificial Sequence: Synthetic oligonucleotide"
ccaccccaauaucgaaggggacuaaaacuaugaccaugauuacgccaagcuugcau

SEQ ID NO: 84 - RNA, 56 nt, Artificial Sequence
  source: /note="Description of Artificial Sequence: Synthetic oligonucleotide"
ccaccccaauaucgaaggggacuaaaacagcuaugaccaugauuacgccaagcuug

SEQ ID NO: 85 - RNA, 56 nt, Artificial Sequence
  source: /note="Description of Artificial Sequence: Synthetic oligonucleotide"
ccaccccaauaucgaaggggacuaaaacgaaacagcuaugaccaugauuacgccaa

SEQ ID NO: 86 - RNA, 56 nt, Artificial Sequence
  source: /note="Description of Artificial Sequence: Synthetic oligonucleotide"
ccaccccaauaucgaaggggacuaaaacacaggaaacagcuaugaccaugauuacg

SEQ ID NO: 87 - RNA, 56 nt, Artificial Sequence
  source: /note="Description of Artificial Sequence: Synthetic oligonucleotide"
ccaccccaauaucgaaggggacuaaaacaacacaggaaacagcuaugaccaugauu

SEQ ID NO: 88 - RNA, 56 nt, Artificial Sequence
  source: /note="Description of Artificial Sequence: Synthetic oligonucleotide"
ccaccccaauaucgaaggggacuaaaacaaacacaggaaacagcuaugaccaugau

SEQ ID NO: 89 - RNA, 56 nt, Artificial Sequence
  source: /note="Description of Artificial Sequence: Synthetic oligonucleotide"
ccaccccaauaucgaaggggacuaaaacauaaacacaggaaacagcuaugaccaug

SEQ ID NO: 90 - RNA, 56 nt, Artificial Sequence
  source: /note="Description of Artificial Sequence: Synthetic oligonucleotide"
ccaccccaauaucgaaggggacuaaaacggauaaacacaggaaacagcuaugacca

SEQ ID NO: 91 - RNA, 56 nt, Artificial Sequence
  source: /note="Description of Artificial Sequence: Synthetic oligonucleotide"
ccaccccaauaucgaaggggacuaaaacagcggauaaacacaggaaacagcuauga

SEQ ID NO: 92 - RNA, 56 nt, Artificial Sequence
  source: /note="Description of Artificial Sequence: Synthetic oligonucleotide"
ccaccccaauaucgaaggggacuaaaacgagcggauaaacacaggaaacagcuaug

SEQ ID NO: 93 - RNA, 56 nt, Artificial Sequence; identical to SEQ ID NO: 72
  source: /note="Description of Artificial Sequence: Synthetic oligonucleotide"

SEQ ID NO: 94 - RNA, 54 nt, Artificial Sequence
  source: /note="Description of Artificial Sequence: Synthetic oligonucleotide"
accccaauaucgaaggggacuaaaacuagauugcuguucuaccaaguaauccau

SEQ ID NO: 95 - RNA, 52 nt, Artificial Sequence
  source: /note="Description of Artificial Sequence: Synthetic oligonucleotide"
cccaauaucgaaggggacuaaaacuagauugcuguucuaccaaguaauccau

SEQ ID NO: 96 - RNA, 50 nt, Artificial Sequence
  source: /note="Description of Artificial Sequence: Synthetic oligonucleotide"
caauaucgaaggggacuaaaacuagauugcuguucuaccaaguaauccau

SEQ ID NO: 97 - RNA, 48 nt, Artificial Sequence
  source: /note="Description of Artificial Sequence: Synthetic oligonucleotide"
auaucgaaggggacuaaaacuagauugcuguucuaccaaguaauccau

SEQ ID NO: 98 - RNA, 47 nt, Artificial Sequence
  source: /note="Description of Artificial Sequence: Synthetic oligonucleotide"
uaucgaaggggacuaaaacuagauugcuguucuaccaaguaauccau

SEQ ID NO: 99 - RNA, 46 nt, Artificial Sequence
  source: /note="Description of Artificial Sequence: Synthetic oligonucleotide"
aucgaaggggacuaaaacuagauugcuguucuaccaaguaauccau

SEQ ID NO: 100 - RNA, 52 nt, Artificial Sequence
  source: /note="Description of Artificial Sequence: Synthetic oligonucleotide"
ccaccccaauaucgaaggggacuaaaacuagauugcuguucuaccaaguaau

SEQ ID NO: 101 - RNA, 51 nt, Artificial Sequence
  source: /note="Description of Artificial Sequence: Synthetic oligonucleotide"
ccaccccaauaucgaaggggacuaaaacuagauugcuguucuaccaaguaa

SEQ ID NO: 102 - RNA, 50 nt, Artificial Sequence
  source: /note="Description of Artificial Sequence: Synthetic oligonucleotide"
ccaccccaauaucgaaggggacuaaaacuagauugcuguucuaccaagua

SEQ ID NO: 103 - RNA, 49 nt, Artificial Sequence
  source: /note="Description of Artificial Sequence: Synthetic oligonucleotide"
ccaccccaauaucgaaggggacuaaaacuagauugcuguucuaccaagu

SEQ ID NO: 104 - RNA, 48 nt, Artificial Sequence
  source: /note="Description of Artificial Sequence: Synthetic oligonucleotide"
ccaccccaauaucgaaggggacuaaaacuagauugcuguucuaccaag

SEQ ID NO: 105 - RNA, 47 nt, Artificial Sequence
  source: /note="Description of Artificial Sequence: Synthetic oligonucleotide"
ccaccccaauaucgaaggggacuaaaacuagauugcuguucuaccaa

SEQ ID NO: 106 - RNA, 46 nt, Artificial Sequence
  source: /note="Description of Artificial Sequence: Synthetic oligonucleotide"
ccaccccaauaucgaaggggacuaaaacuagauugcuguucuacca

SEQ ID NO: 107 - RNA, 45 nt, Artificial Sequence
  source: /note="Description of Artificial Sequence: Synthetic oligonucleotide"
ccaccccaauaucgaaggggacuaaaacuagauugcuguucuacc

SEQ ID NO: 108 - RNA, 44 nt, Artificial Sequence
  source: /note="Description of Artificial Sequence: Synthetic oligonucleotide"
ccaccccaauaucgaaggggacuaaaacuagauugcuguucuac

SEQ ID NO: 109 - RNA, 40 nt, Artificial Sequence
  source: /note="Description of Artificial Sequence: Synthetic oligonucleotide"
ccaccccaauaucgaaggggacuaaaacuagauugcuguu

SEQ ID NO: 110 - RNA, 56 nt, Artificial Sequence
  source: /note="Description of Artificial Sequence: Synthetic oligonucleotide"
ccacccgaauaucgaacgggacuaaaacuagauugcuguucuaccaaguaauccau

SEQ ID NO: 111 - RNA, 56 nt, Artificial Sequence
  source: /note="Description of Artificial Sequence: Synthetic oligonucleotide"
ccaccgcaauaucgaagcggacuaaaacuagauugcuguucuaccaaguaauccau

SEQ ID NO: 112 - RNA, 56 nt, Artificial Sequence
  source: /note="Description of Artificial Sequence: Synthetic oligonucleotide"
ccacgccaauaucgaaggcgacuaaaacuagauugcuguucuaccaaguaauccau

SEQ ID NO: 113 - RNA, 56 nt, Artificial Sequence
  source: /note="Description of Artificial Sequence: Synthetic oligonucleotide"
ccagcccaauaucgaagggcacuaaaacuagauugcuguucuaccaaguaauccau

SEQ ID NO: 114 - RNA, 57 nt, Artificial Sequence
  source: /note="Description of Artificial Sequence: Synthetic oligonucleotide"
ccagggggaauaucgaaccccacuaaaacuagauugcuguucuaccaaguaauccau

SEQ ID NO: 115 - RNA, 57 nt, Artificial Sequence
  source: /note="Description of Artificial Sequence: Synthetic oligonucleotide"
ccaccaccaauaucgaaggggacuaaaacuagauugcuguucuaccaaguaauccau

SEQ ID NO: 116 - RNA, 56 nt, Artificial Sequence
  source: /note="Description of Artificial Sequence: Synthetic oligonucleotide"
ccaacccaauaucgaaggggacuaaaacuagauugcuguucuaccaaguaauccau

SEQ ID NO: 117 - RNA, 56 nt, Artificial Sequence
  source: /note="Description of Artificial Sequence: Synthetic oligonucleotide"
ccacccaaauaucgaaggggacuaaaacuagauugcuguucuaccaaguaauccau

SEQ ID NO: 118 - RNA, 58 nt, Artificial Sequence
  source: /note="Description of Artificial Sequence: Synthetic oligonucleotide"
ccacccccaauaucgaagggggacuaaaacuagauugcuguucuaccaaguaauccau

SEQ ID NO: 119 - RNA, 55 nt, Artificial Sequence
  source: /note="Description of Artificial Sequence: Synthetic oligonucleotide"
ccaccccauaucgaaggggacuaaaacuagauugcuguucuaccaaguaauccau

SEQ ID NO: 120 - RNA, 53 nt, Artificial Sequence
  source: /note="Description of Artificial Sequence: Synthetic oligonucleotide"
ccaccccaucgaaggggacuaaaacuagauugcuguucuaccaaguaauccau

SEQ ID NO: 121 - RNA, 49 nt, Artificial Sequence
  source: /note="Description of Artificial Sequence: Synthetic oligonucleotide"
ccaccccaaggggacuaaaacuagauugcuguucuaccaaguaauccau

SEQ ID NO: 122 - RNA, 57 nt, Artificial Sequence
  source: /note="Description of Artificial Sequence: Synthetic oligonucleotide"
ccaccccaaauaucgaaggggacuaaaacuagauugcuguucuaccaaguaauccau

SEQ ID NO: 123 - RNA, 59 nt, Artificial Sequence
  source: /note="Description of Artificial Sequence: Synthetic oligonucleotide"
ccaccccaaaaauaucgaaggggacuaaaacuagauugcuguucuaccaaguaauccau

SEQ ID NO: 124 - RNA, 63 nt, Artificial Sequence
  source: /note="Description of Artificial Sequence: Synthetic oligonucleotide"
ccaccccaaaaaaaaauaucgaaggggacuaaaacuagauugcuguucuaccaaguaauccau

SEQ ID NO: 125 - RNA, 56 nt, Artificial Sequence
  source: /note="Description of Artificial Sequence: Synthetic oligonucleotide"
ccaccccgauaucgaaggggacuaaaacuagauugcuguucuaccaaguaauccau

SEQ ID NO: 126 - RNA, 56 nt, Artificial Sequence
  source: /note="Description of Artificial Sequence: Synthetic oligonucleotide"
ccaccccaaaaucgaaggggacuaaaacuagauugcuguucuaccaaguaauccau

SEQ ID NO: 127 - RNA, 56 nt, Artificial Sequence
  source: /note="Description of Artificial Sequence: Synthetic oligonucleotide"
ccaccccaauauccaaggggacuaaaacuagauugcuguucuaccaaguaauccau

SEQ ID NO: 128 - RNA, 56 nt, Artificial Sequence
  source: /note="Description of Artificial Sequence: Synthetic oligonucleotide"
ccaccccaauaucgaaggggacuaaaacaagauugcuguucuaccaaguaauccau

SEQ ID NO: 129 - RNA, 56 nt, Artificial Sequence
  source: /note="Description of Artificial Sequence: Synthetic oligonucleotide"
ccaccccaauaucgaaggggacuaaaacuagaaugcuguucuaccaaguaauccau

SEQ ID NO: 130 - RNA, 56 nt, Artificial Sequence
  source: /note="Description of Artificial Sequence: Synthetic oligonucleotide"
ccaccccaauaucgaaggggacuaaaacuagauugcaguucuaccaaguaauccau

SEQ ID NO: 131 - RNA, 56 nt, Artificial Sequence
  source: /note="Description of Artificial Sequence: Synthetic oligonucleotide"
ccaccccaauaucgaaggggacuaaaacuagauugcuguuguaccaaguaauccau

SEQ ID NO: 132 - RNA, 56 nt, Artificial Sequence
  source: /note="Description of Artificial Sequence: Synthetic oligonucleotide"
ccaccccaauaucgaaggggacuaaaacuagauugcuguucuacgaaguaauccau

SEQ ID NO: 133 - RNA, 56 nt, Artificial Sequence
  source: /note="Description of Artificial Sequence: Synthetic oligonucleotide"
ccaccccaauaucgaaggggacuaaaacuagauugcuguucuaccaagaaauccau

SEQ ID NO: 134 - RNA, 56 nt, Artificial Sequence
  source: /note="Description of Artificial Sequence: Synthetic oligonucleotide"
ccaccccaauaucgaaggggacuaaaacuagauugcuguucuaccaaguaaugcau

SEQ ID NO: 135 - RNA, 56 nt, Artificial Sequence
  source: /note="Description of Artificial Sequence: Synthetic oligonucleotide"
ccaccccaauaucgaaggggacuaaaacuagauugcuguucuaccaaguaauccaa

SEQ ID NO: 136 - RNA, 56 nt, Artificial Sequence
  source: /note="Description of Artificial Sequence: Synthetic oligonucleotide"
ccaccccaauaucgaaggggacuaaaacaugauugcuguucuaccaaguaauccau

SEQ ID NO: 137 - RNA, 56 nt, Artificial Sequence
  source: /note="Description of Artificial Sequence: Synthetic oligonucleotide"
ccaccccaauaucgaaggggacuaaaacuagauaccuguucuaccaaguaauccau

SEQ ID NO: 138 - RNA, 56 nt, Artificial Sequence
  source: /note="Description of Artificial Sequence: Synthetic oligonucleotide"
ccaccccaauaucgaaggggacuaaaacuagauugcugaacuaccaaguaauccau

SEQ ID NO: 139 - RNA, 56 nt, Artificial Sequence
  source: /note="Description of Artificial Sequence: Synthetic oligonucleotide"
ccaccccaauaucgaaggggacuaaaacuagauugcuguucuaggaaguaauccau

SEQ ID NO: 140 - RNA, 56 nt, Artificial Sequence
  source: /note="Description of Artificial Sequence: Synthetic oligonucleotide"
ccaccccaauaucgaaggggacuaaaacuagauugcuguucuaccaagauauccau

SEQ ID NO: 141 - RNA, 56 nt, Artificial Sequence
  source: /note="Description of Artificial Sequence: Synthetic oligonucleotide"
ccaccccaauaucgaaggggacuaaaacuagauugcuguucuaccaaguaaucguu

SEQ ID NO: 142 - RNA, 173 nt, Artificial Sequence
  source: /note="Description of Artificial Sequence: Synthetic polynucleotide"
ggccagugaauucgagcucgguacccggggauccucuagaaauauggauuacuugguagaacagcaaucuacucgaccugcaggcaugcaagcuuggcguaaucauggucauagcuguuuccuguguuuauccgcucacaauuccacacaacauacgagccggaagcauaaag

SEQ ID NO: 143 - RNA, 152 nt, Artificial Sequence
  source: /note="Description of Artificial Sequence: Synthetic polynucleotide"
aauauggauuacuugguagaacagcaaucuacaaaaaaaaaaaaaaaaaaagaaaaaaaaaaaaaaaaaaagaaaaaaaaaaaaaaaaaaagaaaaaaaaaaaaaaaaaaagaaaaaaaaaaaaaaaaaaagaaaaaaaaaaaaaaaaaaag

SEQ ID NO: 144 - RNA, 152 nt, Artificial Sequence
  source: /note="Description of Artificial Sequence: Synthetic polynucleotide"
aauauggauuacuugguagaacagcaaucuacuuuuuuuuuuuuuuuuuuucuuuuuuuuuuuuuuuuuuucuuuuuuuuuuuuuuuuuuucuuuuuuuuuuuuuuuuuuucuuuuuuuuuuuuuuuuuuucuuuuuuuuuuuuuuuuuuuc

SEQ ID NO: 145 - RNA, 176 nt, Artificial Sequence
  source: /note="Description of Artificial Sequence: Synthetic polynucleotide"
ggguagguguuccacaggguagccagcagcauccugcgaugcaaauauggauuacuugguagaacagcaaucuaauccggaacauaauggugcagggcgcugacuuccgcguuuccagacuuuacgaaacacggaaaccgaagaccauucauguuguugcugccggaagcauaaag

SEQ ID NO: 146 - RNA, 176 nt, Artificial Sequence
  source: /note="Description of Artificial Sequence: Synthetic polynucleotide"
gggccccuccguucgcguuuacgcggacggugagacugaagauaauauggauuacuugguagaacagcaaucuaaacucauucucuuuaaaauaucguucgaacuggacucccggucguuuuaacucgacuggggccaaaacgaaacaguggcacuaccccgccggaagcauaaag

SEQ ID NO: 147 - RNA, 173 nt, Artificial Sequence
  source: /note="Description of Artificial Sequence: Synthetic polynucleotide"
ggccagugaauucgagcucgguacccggggauccucuagaaauauggauuacuugguagaacagcaaucuagucgaccugcaggcaugcaagcuuggcguaaucauggucauagcuguuuccuguguuuauccgcucacaauuccacacaacauacgagccggaagcauaaag

SEQ ID NO: 148 - RNA, 173 nt, Artificial Sequence
  source: /note="Description of Artificial Sequence: Synthetic polynucleotide"
ggccagugaauucgagcucgguacccggggauccucuagaaauauggauuacuugguagaacagcaaucuaaucgaccugcaggcaugcaagcuuggcguaaucauggucauagcuguuuccuguguuuauccgcucacaauuccacacaacauacgagccggaagcauaaag

SEQ ID NO: 149 - RNA, 173 nt, Artificial Sequence
  source: /note="Description of Artificial Sequence: Synthetic polynucleotide"
ggccagugaauucgagcucgguacccggggauccucuagaaauauggauuacuugguagaacagcaaucuauucgaccugcaggcaugcaagcuuggcguaaucauggucauagcuguuuccuguguuuauccgcucacaauuccacacaacauacgagccggaagcauaaag

SEQ ID NO: 150 - RNA, 175 nt, Artificial Sequence
  source: /note="Description of Artificial Sequence: Synthetic polynucleotide"
accgaucgucguuguuugggcaaugcacguucuccaacggugcuccuauggggcacaaguugcaggaugcagcgccuuacaagaaguucgcugaacaagcaaccguuaccccccgcgcucugagagcggcucuauugguccgagaccaaugugcgccguggaucagacacgcggu

SEQ ID NO: 151 - RNA, 175 nt, Artificial Sequence
  source: /note="Description of Artificial Sequence: Synthetic polynucleotide"
acuguuggugguguagagcuuccuguagccgcauggcguucguacuuaaauauggaacuaaccauuccaauuuucgcuacgaauuccgacugcgagcuuauuguuaaggcaaugcaaggucuccuaaaagauggaaacccgauucccucagcaaucgcagcaaacuccggcaucu

SEQ ID NO: 152 - RNA, 175 nt, Artificial Sequence
  source: /note="Description of Artificial Sequence: Synthetic polynucleotide"
gguaacaugcucgagggccuuacggcccccgugggaugcuccuacaugucaggaacaguuacugacguaauaacgggugaguccaucauaagcguugacgcucccuacggguggacuguggagagacagggcacugcuaaggcccaaaucucagccaugcaucgagggguacaau

SEQ ID NO: 153 - RNA, 175 nt, Artificial Sequence
  source: /note="Description of Artificial Sequence: Synthetic polynucleotide"
uucguaaaacguucguguccgggcucuuucgcgagagcugcggcgcgcacuuuuaccguggugucgaugucaaaccguuuuacaucaagaaaccuguugacaaucucuucgcccugaugcugauauuaaaucggcuacgggguuggggaguugucggagguaugucagauccacg

SEQ ID NO: 154 - RNA, 70 nt, Artificial Sequence
  source: /note="Description of Artificial Sequence: Synthetic oligonucleotide"
auaggccagugaauucgagcucgaauauggauuacuugguagaacagcaaucuacgccggaagcauaaag

SEQ ID NO: 155 - RNA, 70 nt, Artificial Sequence
  source: /note="Description of Artificial Sequence: Synthetic oligonucleotide"
cuuuaugcuuccggcguagauugcuguucuaccaaguaauccauauucgagcucgaauucacuggccuau

SEQ ID NO: 156 - DNA, 198 bp, Artificial Sequence
  source: /note="Description of Artificial Sequence: Synthetic polynucleotide"
ctttatgcttccggctcgtatgttgtgtggaattgtgagcggataaacacaggaaacagctatgaccatgattacgccaagcttgcatgcctgcaggtcgagaatatggattacttggtagaacagcaatctatctagaggatccccgggtaccgagctcgaattcactggccccctatagtgagtcgtattaatttc

SEQ ID NO: 157 - RNA, 28 nt, Artificial Sequence
  source: /note="Description of Artificial Sequence: Synthetic oligonucleotide"
gaaguuugcagcuggauacgacagacgg

SEQ ID NO: 158 - RNA, 28 nt, Artificial Sequence
  source: /note="Description of Artificial Sequence: Synthetic oligonucleotide"
ugucuggaaguuugcagcuggauacgac

SEQ ID NO: 159 - RNA, 28 nt, Artificial Sequence
  source: /note="Description of Artificial Sequence: Synthetic oligonucleotide"
agcuggauacgacagacggccaucuaac

SEQ ID NO: 160 - RNA, 28 nt, Artificial Sequence
  source: /note="Description of Artificial Sequence: Synthetic oligonucleotide"
uacgucgcgauauguugcacguugucug

SEQ ID NO: 161 - RNA, 31 nt, Artificial Sequence
  source: /note="Description of Artificial Sequence: Synthetic oligonucleotide"
uacggacgaccuucaccuucaccuucgauuu

SEQ ID NO: 162 - RNA, 31 nt, Artificial Sequence
  source: /note="Description of Artificial Sequence: Synthetic oligonucleotide"
ucguacggacgaccuucaccuucaccuucga

SEQ ID NO: 163 - RNA, 31 nt, Artificial Sequence
  source: /note="Description of Artificial Sequence: Synthetic oligonucleotide"
cggucuggguaccuucguacggacgaccuuc

SEQ ID NO: 164 - RNA, 31 nt, Artificial Sequence
  source: /note="Description of Artificial Sequence: Synthetic oligonucleotide"
gcggucuggguaccuucguacggacgaccuu

SEQ ID NO: 165 - RNA, 31 nt, Artificial Sequence
  source: /note="Description of Artificial Sequence: Synthetic oligonucleotide"
agcggucuggguaccuucguacggacgaccu

SEQ ID NO: 166 - RNA, 31 nt, Artificial Sequence
  source: /note="Description of Artificial Sequence: Synthetic oligonucleotide"
aguucauaacacguucccauuugaaaccuuc

SEQ ID NO: 167 - RNA, 31 nt, Artificial Sequence
  source: /note="Description of Artificial Sequence: Synthetic oligonucleotide"
uuaacuuuguagaugaacucaccgucuugca

SEQ ID NO: 168 - RNA, 31 nt, Artificial Sequence
  source: /note="Description of Artificial Sequence: Synthetic oligonucleotide"
uuuaacuuuguagaugaacucaccgucuugc

SEQ ID NO: 169 - RNA, 31 nt, Artificial Sequence
  source: /note="Description of Artificial Sequence: Synthetic oligonucleotide"
guuuaacuuuguagaugaacucaccgucuug

SEQ ID NO: 170 - RNA, 28 nt, Artificial Sequence
  source: /note="Description of Artificial Sequence: Synthetic oligonucleotide"
aaguuugcagcuggauacgacagacggc

SEQ ID NO: 171 - RNA, 28 nt, Artificial Sequence
  source: /note="Description of Artificial Sequence: Synthetic oligonucleotide"
acaggaugucccaagcgaacggcagcgg

SEQ ID NO: 172 - RNA, 28 nt, Artificial Sequence
  source: /note="Description of Artificial Sequence: Synthetic oligonucleotide"
gcuuguucagcgaacuucuuguaaggcg

SEQ ID NO: 173 - RNA, 28 nt, Artificial Sequence
  source: /note="Description of Artificial Sequence: Synthetic oligonucleotide"
uaagcucgcagucggaauucguagcgaa

SEQ ID NO: 174 - RNA, 28 nt, Artificial Sequence
  source: /note="Description of Artificial Sequence: Synthetic oligonucleotide"
cgucaacgcuuaugauggacucacccgu

SEQ ID NO: 175 - RNA, 28 nt, Artificial Sequence
  source: /note="Description of Artificial Sequence: Synthetic oligonucleotide"
ucaacagguuucuugauguaaaacgguu

SEQ ID NO: 176 - RNA, 28 nt, Artificial Sequence
  source: /note="Description of Artificial Sequence: Synthetic oligonucleotide"
aaguuugcagcuggauacgacagacggc

SEQ ID NO: 177 - RNA, 28 nt, Artificial Sequence
  source: /note="Description of Artificial Sequence: Synthetic oligonucleotide"
uuugcagcuggauacgacagacggccau

SEQ ID NO: 178 - RNA, 28 nt, Artificial Sequence
  source: /note="Description of Artificial Sequence: Synthetic oligonucleotide"
cagcuggauacgacagacggccaucuaa

SEQ ID NO: 179 - RNA, 28 nt, Artificial Sequence
  source: /note="Description of Artificial Sequence: Synthetic oligonucleotide"
guugucuggaaguuugcagcuggauacg

SEQ ID NO: 180 - RNA, 28 nt, Artificial Sequence
  source: /note="Description of Artificial Sequence: Synthetic oligonucleotide"
gcgauauguugcacguugucuggaaguu

SEQ ID NO: 181 - RNA, 28 nt, Artificial Sequence
  source: /note="Description of Artificial Sequence: Synthetic oligonucleotide"
acguugucuggaaguuugcagcuggaua

SEQ ID NO: 182 - RNA, 28 nt, Artificial Sequence
  source: /note="Description of Artificial Sequence: Synthetic oligonucleotide"
auguugcacguugucuggaaguuugcag

SEQ ID NO: 183 - RNA, 28 nt, Artificial Sequence
  source: /note="Description of Artificial Sequence: Synthetic oligonucleotide"
ugcagcuggauacgacagacggccaucu

SEQ ID NO: 184 - RNA, 28 nt, Artificial Sequence
  source: /note="Description of Artificial Sequence: Synthetic oligonucleotide"
cuggaaguuugcagcuggauacgacaga

SEQ ID NO: 185 - RNA, 28 nt, Artificial Sequence
  source: /note="Description of Artificial Sequence: Synthetic oligonucleotide"
aguuugcagcuggauacgacagacggcc

SEQ ID NO: 186 - RNA, 28 nt, Artificial Sequence
  source: /note="Description of Artificial Sequence: Synthetic oligonucleotide"
gcuggauacgacagacggccaucuaacu

SEQ ID NO: 187 - RNA, 28 nt, Artificial Sequence
  source: /note="Description of Artificial Sequence: Synthetic oligonucleotide"
guuugcagcuggauacgacagacggcca

SEQ ID NO: 188 - RNA, 28 nt, Artificial Sequence
  source: /note="Description of Artificial Sequence: Synthetic oligonucleotide"
uaguuugcagcuggauacgacagacggc

SEQ ID NO: 189 - RNA, 28 nt, Artificial Sequence
  source: /note="Description of Artificial Sequence: Synthetic oligonucleotide"
aaguaugcagcuggauacgacagacggc

SEQ ID NO: 190 - RNA, 28 nt, Artificial Sequence
  source: /note="Description of Artificial Sequence: Synthetic oligonucleotide"
aaguuugcugcuggauacgacagacggc

SEQ ID NO: 191 - RNA, 28 nt, Artificial Sequence
  source: /note="Description of Artificial Sequence: Synthetic oligonucleotide"
aaguuugcagcucgauacgacagacggc

SEQ ID NO: 192 - RNA, 28 nt, Artificial Sequence
  source: /note="Description of Artificial Sequence: Synthetic oligonucleotide"
aaguuugcagcuggauucgacagacggc

SEQ ID NO: 193 - RNA, 28 nt, Artificial Sequence
  source: /note="Description of Artificial Sequence: Synthetic oligonucleotide"
aaguuugcagcuggauacgagagacggc

SEQ ID NO: 194 - RNA, 28 nt, Artificial Sequence
  source: /note="Description of Artificial Sequence: Synthetic oligonucleotide"
aaguuugcagcuggauacgacagagggc

SEQ ID NO: 195 - RNA, 28 nt, Artificial Sequence
  source: /note="Description of Artificial Sequence: Synthetic oligonucleotide"
uuguuugcagcuggauacgacagacggc

SEQ ID NO: 196 - RNA, 28 nt, Artificial Sequence
  source: /note="Description of Artificial Sequence: Synthetic oligonucleotide"
aaguuaccagcuggauacgacagacggc

SEQ ID NO: 197 - RNA, 28 nt, Artificial Sequence
  source: /note="Description of Artificial Sequence: Synthetic oligonucleotide"
aaguuugcaggaggauacgacagacggc

SEQ ID NO: 198 - RNA, 28 nt, Artificial Sequence
  source: /note="Description of Artificial Sequence: Synthetic oligonucleotide"
aaguuugcagcuggaaucgacagacggc

SEQ ID NO: 199 - RNA, 28 nt, Artificial Sequence
  source: /note="Description of Artificial Sequence: Synthetic oligonucleotide"
aaguuugcagcuggauacgagugacggc

SEQ ID NO: 200 - protein, 6 aa, Artificial Sequence
  source: /note="Description of Artificial Sequence: Synthetic 6xHis tag"
HHHHHH

SEQ ID NO: 201 - protein, 5 aa, Unknown
  source: /note="Description of Unknown: 'GGDEF' family motif peptide"
GGDEF

SEQ ID NO: 202 - protein, 18 aa, Alicyclobacillus acidoterrestris
LRVMSVDLGLRTSASISV

SEQ ID NO: 203 - protein, 22 aa, Alicyclobacillus acidoterrestris
QRTLRQLRTQLAYLRLLVRCGS

SEQ ID NO: 204 - protein, 12 aa, Alicyclobacillus acidoterrestris
CQLILLEELSEY

SEQ ID NO: 205 - protein, 16 aa, Alicyclobacillus acidoterrestris
HQIHADLNAAQNLQQR

SEQ ID NO: 206 - protein, 18 aa, Alicyclobacillus contaminans
VRVMSVDLGVRYGAAISV

SEQ ID NO: 207 - protein, 22 aa, Alicyclobacillus contaminans
KQALAAIRAEMSILRKWLRVSQ

SEQ ID NO: 208 - protein, 12 aa, Alicyclobacillus contaminans
CDLILFEDLSRY

SEQ ID NO: 209 - protein, 16 aa, Alicyclobacillus contaminans
KCVHADINAAHNLQRR

SEQ ID NO: 210 - protein, 18 aa, Desulfovibrio inopinatus
LRVLSVDLGMRTFASCSV

SEQ ID NO: 211 - protein, 22 aa, Desulfovibrio inopinatus
RAEIYALKRDIQRLKSLLRLGE

SEQ ID NO: 212 - protein, 12 aa, Desulfovibrio inopinatus
CQLILFEDLARY

SEQ ID NO: 213 - protein, 16 aa, Desulfovibrio inopinatus
CVIHADMNAAQNLQRR

SEQ ID NO: 214 - protein, 18 aa, Desulfonatronum thiodismutans
LRVLSVDLGVRSFAACSV

SEQ ID NO: 215 - protein, 22 aa, Desulfonatronum thiodismutans
MEELRSLNGDIRRLKAILRLSV

SEQ ID NO: 216 - protein, 12 aa, Desulfonatronum thiodismutans
CRLILFEDLARY

SEQ ID NO: 217 - protein, 16 aa, Desulfonatronum thiodismutans
HVIHADINAAQNLQRR

SEQ ID NO: 218 - protein, 18 aa, Tuberibacillus calidus
LRVMSVDLGQRQAAAISI

SEQ ID NO: 219 - protein, 22 aa, Tuberibacillus calidus
DQAIRDLSRKLKFLKNVLNMQK

SEQ ID NO: 220 - protein, 12 aa, Tuberibacillus calidus
CQLVLFEDLSRY

SEQ ID NO: 221 - protein, 16 aa, Tuberibacillus calidus
VITHADINAAQNLQKR

SEQ ID NO: 222 - protein, 18 aa, Bacillus thermoamylovorans
LRVMSIDLGQRQAAAASI

SEQ ID NO: 223 - protein, 22 aa, Bacillus thermoamylovorans
EDNLKLMNQKLNFLRNVLHFQQ

SEQ ID NO: 224 - protein, 12 aa, Bacillus thermoamylovorans
CQIILFEDLSNY

SEQ ID NO: 225 - protein, 16 aa, Bacillus thermoamylovorans
VTTHADINAAQNLQKR

SEQ ID NO: 226 - protein, 18 aa, Bacillus sp.
FRVMSIDLGLRAAAATSI

SEQ ID NO: 227 - protein, 22 aa, Bacillus sp.
FQLHQRVKFQIRVLAQIMRMAN

SEQ ID NO: 228 - protein, 12 aa, Bacillus sp.
CQVILFENLSQY

SEQ ID NO: 229 - protein, 16 aa, Bacillus sp.
VFLQADINAAHNLQKR

SEQ ID NO: 230 - protein, 18 aa, Methylobacterium nodulans
LRVLSIDLGVRSFATCSV

SEQ ID NO: 231 - protein, 22 aa, Methylobacterium nodulans
DAELRQLRGGLNRHRQLLRAAT

SEQ ID NO: 232 - protein, 12 aa, Methylobacterium nodulans
CHVILFEDLSRY

SEQ ID NO: 233 - protein, 16 aa, Methylobacterium nodulans
SRIHADINAAQNLQRR

SEQ ID NO: 234 - protein, 18 aa, Unknown
  source: /note="Description of Unknown: Candidatus Methanomethylophilus alvus sequence"
LKIIGIDRGERNLIYVTM

SEQ ID NO: 235 - protein, 22 aa, Unknown
  source: /note="Description of Unknown: Candidatus Methanomethylophilus alvus sequence"
RKALDVREYDNKEARRNWTKVE

SEQ ID NO: 236 - protein, 13 aa, Unknown
  source: /note="Description of Unknown: Candidatus Methanomethylophilus alvus sequence"
NAIIVMEDLNHGF

SEQ ID NO: 237 - protein, 16 aa, Unknown
  source: /note="Description of Unknown: Candidatus Methanomethylophilus alvus sequence"
LPQDSDANGAYNIALK

SEQ ID NO: 238 - protein, 18 aa, Synergistes jonesii
VNIIGIDRGERNLVYVSL

SEQ ID NO: 239 - protein, 22 aa, Synergistes jonesii
HAKLNQKEKERDTARKSWKTIG

SEQ ID NO: 240 - protein, 13 aa, Synergistes jonesii
NAVIVMEDLNIGF

SEQ ID NO: 241 - protein, 16 aa, Synergistes jonesii
LPIDADANGAYHIALK

SEQ ID NO: 242 - protein, 18 aa, Unknown
  source: /note="Description of Unknown: Lachnospiraceae bacterium sequence"
PYVIGIDRGERNLLYIVV

SEQ ID NO: 243 - protein, 22 aa, Unknown
  source: /note="Description of Unknown: Lachnospiraceae bacterium sequence"
HSLLDKKEKERFEARQNWTSIE

SEQ ID NO: 244 - protein, 13 aa, Unknown
  source: /note="Description of Unknown: Lachnospiraceae bacterium sequence"
DAVIALEDLNSGF

SEQ ID NO: 245 - protein, 16 aa, Unknown
  source: /note="Description of Unknown: Lachnospiraceae bacterium sequence"
LPKNADANGAYNIARK

SEQ ID NO: 246 - protein, 18 aa, Francisella tularensis
VHILSIDRGERHLAYYTL

SEQ ID NO: 247 - protein, 22 aa, Francisella tularensis
HDKLAAIEKDRDSARKDWKKIN

SEQ ID NO: 248 - protein, 13 aa, Francisella tularensis
NAIVVFEDLNFGF

SEQ ID NO: 249 - protein, 16 aa, Francisella tularensis
MPQDADANGAYHIGLK

SEQ ID NO: 250 - protein, 18 aa, Moraxella caprae
VNVIGIDRGERHLLYLTV

SEQ ID NO: 251 - protein, 22 aa, Moraxella caprae
HKILDKREIERLNARVGWGEIE

SEQ ID NO: 252 - protein, 13 aa, Moraxella caprae
NAIVVLEDLNFGF

SEQ ID NO: 253 - protein, 16 aa, Moraxella caprae
QPQNADANGAYHIALK

SEQ ID NO: 254 - protein, 18 aa, Unknown
  source: /note="Description of Unknown: Lachnospiraceae bacterium sequence"
MHIIGIDRGERNLIYLCM

SEQ ID NO: 255 - protein, 22 aa, Unknown
  source: /note="Description of Unknown: Lachnospiraceae bacterium sequence"
HQLLKTREDENKSARQSWQTIH

SEQ ID NO: 256 - protein, 13 aa, Unknown
  source: /note="Description of Unknown: Lachnospiraceae bacterium sequence"
NAIVVLEDLNFGF

SEQ ID NO: 257 - protein, 16 aa, Unknown
  source: /note="Description of Unknown: Lachnospiraceae bacterium sequence"
MPLDADANGAYNIARK

SEQ ID NO: 258 - protein, 18 aa, Prevotella albensis
THIIGIDRGERHLLYLSL

SEQ ID NO: 259 - protein, 22 aa, Prevotella albensis
HNLLEKREKERTEARHSWSSIE

SEQ ID NO: 260 - protein, 13 aa, Prevotella albensis
NAIVVLEDLNGGF

SEQ ID NO: 261 - protein, 16 aa, Prevotella albensis
FPENADANGAYNIARK

SEQ ID NO: 262 - protein, 18 aa, Smithella sp.
INIIGIDRGERHLLYYAL

SEQ ID NO: 263 - protein, 22 aa, Smithella sp.
HNLLDKKEGDRATARQEWGVIE

SEQ ID NO: 264 - protein, 13 aa, Smithella sp.
NAIIVMEDLNFGF

SEQ ID NO: 265 - protein, 16 aa, Smithella sp.
MPKNADANGAYHIALK

SEQ ID NO: 266 - protein, 18 aa, Porphyromonas crevioricanis
MHVIGIDRGERNLLYICV

SEQ ID NO: 267 - protein, 22 aa, Porphyromonas crevioricanis
HDLLESRDKDRQQERRNWQTIE

SEQ ID NO: 268 - protein, 13 aa, Porphyromonas crevioricanis
KAVVALEDLNMGF

SEQ ID NO: 269 - protein, 16 aa, Porphyromonas crevioricanis
LPKDADANGAYNIALK

SEQ ID NO: 270 - protein, 18 aa, Sulfolobus solfataricus
GKVVAIDVGVEKLLITSD

SEQ ID NO: 271 - protein, 23 aa, Sulfolobus solfataricus
VKHIHRELSRKKFLSNNWFKAKV

SEQ ID NO: 272 - protein, 13 aa, Sulfolobus solfataricus
YDVVVMEGIHAKQ

SEQ ID NO: 273 - protein, 16 aa, Sulfolobus solfataricus
WIADRDYNASLNILRG

SEQ ID NO: 274 - protein, 18 aa, Nostoc sp.
LKTIGLDVGLNHFLTDSE

SEQ ID NO: 275 - protein, 23 aa, Nostoc sp.
LKRLQRRLSKTKKGSNNRVKARN

SEQ ID NO: 276 - protein, 13 aa, Nostoc sp.
SDLVAYEDLQVRN

SEQ ID NO: 277 - protein, 16 aa, Nostoc sp.
HIQDRDWNAARNILEL

SEQ ID NO: 278 - protein, 18 aa, Unknown
  source: /note="Description of Unknown: Candidatus Nitrososphaera gargensis sequence"
AKPVGIDVGIAKFCHHSD

SEQ ID NO: 279 - protein, 23 aa, Unknown
  source: /note="Description of Unknown: Candidatus Nitrososphaera gargensis sequence"
LRRAHRRVSRRQIGSNNRKKAKR

SEQ ID NO: 280 - protein, 13 aa, Unknown
  source: /note="Description of Unknown: Candidatus Nitrososphaera gargensis sequence"
YDLIFLERLRVMN

SEQ ID NO: 281 - protein, 16 aa, Unknown
  source: /note="Description of Unknown: Candidatus Nitrososphaera gargensis sequence"
AILDRDYNSAINILKR

SEQ ID NO: 282 - protein, 18 aa, Helicobacter pylori
KKAVGLDMGLRTLIVTSD

SEQ ID NO: 283 - protein, 23 aa, Helicobacter pylori
LTKAQRRLSKKVKDSNNRKKQAK

SEQ ID NO: 284 - protein, 13 aa, Helicobacter pylori
YDLIGVETLNVKA

SEQ ID NO: 285 - protein, 16 aa, Helicobacter pylori
TTHHRDYNASVNIRNY

SEQ ID NO: 286 - protein, 18 aa, Flexibacter litoralis
NQAVGIDMGITFFCIDSN

SEQ ID NO: 287 - protein, 23 aa, Flexibacter litoralis
LRIANRSLSRKKKFSNGWYKKKV

SEQ ID NO: 288 - protein, 13 aa, Flexibacter litoralis
NSLVVVEDLKVKN

SEQ ID NO: 289 - protein, 16 aa, Flexibacter litoralis
HETNADENASKNILSE

SEQ ID NO: 290 - protein, 18 aa, Escherichia coli
ASMVGLDAGVAKLATLSD

SEQ ID NO: 291 - protein, 23 aa, Escherichia coli
LARLQRQLSRKVKFSNNWQKQKR

SEQ ID NO: 292 - protein, 13 aa, Escherichia coli
HAMIVIEDLKVSN

SEQ ID NO: 293 - protein, 16 aa, Escherichia coli
YTANADVNGARNILAA

SEQ ID NO: 294 - protein, 18 aa, Clostridium botulinum
NKKVGIDVGLKEFATTSD

SEQ ID NO: 295 - protein, 23 aa, Clostridium botulinum
LAKLQKDLSRKKKNSNNRKKARL

SEQ ID NO: 296 - protein, 13 aa, Clostridium botulinum
NQAIVIENLKVSN

SEQ ID NO: 297 - protein, 16 aa, Clostridium botulinum
MIMDRDLNASKNLLNL

SEQ ID NO: 298 - protein, 18 aa, Acidaminococcus sp.
MYYLGLDIGTNSVGYAVT

SEQ ID NO: 299 - protein, 22 aa, Acidaminococcus sp.
AERRSFRTSRRRLDRRQQRVKL

SEQ ID NO: 300 - protein, 13 aa, Acidaminococcus sp.
PKRIFIEMARDGE

SEQ ID NO: 301 - protein, 16 aa, Acidaminococcus sp.
LHHAKDAFLAIVTGNV

SEQ ID NO: 302 - protein, 18 aa, Coprococcus catus
EYFLGLDMGTGSLGWAVT

SEQ ID NO: 303 - protein, 22 aa, Coprococcus catus
EERRMFRTARRRLDRRNWRIQV

SEQ ID NO: 304 - protein, 13 aa, Coprococcus catus
PKRVFVEMAREKQ

SEQ ID NO: 305 - protein, 16 aa, Coprococcus catus
LHHAKDAYLNIVVGNA

SEQ ID NO: 306 - protein, 18 aa, Treponema denticola
DYFLGLDVGTGSVGWAVT

SEQ ID NO: 307 - protein, 22 aa, Treponema denticola
EVRRLHRGARRRIERRKKRIKL

SEQ ID NO: 308 - protein, 13 aa, Treponema denticola
PKKIFIEMAKGAE

SEQ ID NO: 309 - protein, 16 aa, Treponema denticola
FHHAHDAYLNIVVGNV

SEQ ID NO: 310 - protein, 18 aa, Mycoplasma mobile
KVVLGLDLGIASVGWCLT

SEQ ID NO: 311 - protein, 22 aa, Mycoplasma mobile
ETRRKKRGQRRRNRRLFTRKRD

SEQ ID NO: 312 - protein, 13 aa, Mycoplasma mobile
IEKIVVEVTRSSN

SEQ ID NO: 313 - protein, 16 aa, Mycoplasma mobile
GHHAEDAYFITIISQY

SEQ ID NO: 314 - protein, 18 aa, Streptococcus thermophilus
DLVLGLDIGIGSVGVGIL

SEQ ID NO: 315 - protein, 22 aa, Streptococcus thermophilus
LVRRTNRQGRRLTRRKKHRIVR

SEQ ID NO: 316 - protein, 13 aa, Streptococcus thermophilus
FDNIVIEMARETN

SEQ ID NO: 317 - protein, 16 aa, Streptococcus thermophilus
HHHAVDALIIAASSQL

SEQ ID NO: 318 - protein, 18 aa, Campylobacter jejuni
ARILAFDIGISSIGWAFS

SEQ ID NO: 319 - protein, 22 aa, Campylobacter jejuni
LPRRLARSARKRLARRKARLNH

SEQ ID NO: 320 - protein, 13 aa, Campylobacter jejuni
VHKINIELAREVG

SEQ ID NO: 321 - protein, 16 aa, Campylobacter jejuni
LHHAIDAVIIAYANNS

SEQ ID NO: 322 - protein, 18 aa, Clostridium perfringens
NYALGLDIGITSVGWAVI

SEQ ID NO: 323 - protein, 22 aa, Clostridium perfringens
LPRRLARGRRRLLRRKAYRVER

SEQ ID NO: 324 - protein, 13 aa, Clostridium perfringens
PVRINIELARDLA

SEQ ID NO: 325 - protein, 16 aa, Clostridium perfringens
KHHALDAAVVGVTTQG

SEQ ID NO: 326 - protein, 18 aa, Akkermansia muciniphila
SLTFSFDIGYASIGWAVI

SEQ ID NO: 327 - protein, 22 aa, Akkermansia muciniphila
FKRREYRRLRRNIRSRRVRIER

SEQ ID NO: 328 - protein, 13 aa, Akkermansia muciniphila
ISRVCVEVGKELT

SEQ ID NO: 329 - protein, 16 aa, Akkermansia muciniphila
LHHALDACVLGLIPYI

SEQ ID NO: 330 - protein, 18 aa, Bifidobacterium longum
RYRIGIDVGLNSVGLAAV

SEQ ID NO: 331 - protein, 22 aa, Bifidobacterium longum
NMSGVARRTRRMRRRKRERLHK

SEQ ID NO: 332 - protein, 13 aa, Bifidobacterium longum
PVSVNIEHVRSSF

SEQ ID NO: 333 - protein, 16 aa, Bifidobacterium longum
RHHAVDASVIAMMNTA

SEQ ID NO: 334 - protein, 18 aa, Wolinella succinogenes
VSPISVDLGGKNTGFFSF

SEQ ID NO: 335 - protein, 22 aa, Wolinella succinogenes
VGRRSKRHSKRNNLRNKLVKRL

SEQ ID NO: 336 - protein, 13 aa, Wolinella succinogenes
KVPIILEQNAFEY

SEQ ID NO: 337 - protein, 16 aa, Wolinella succinogenes
SSHAIDAVMAFVARYQ

SEQ ID NO: 338 - protein, 18 aa, Legionella pneumophila
LSPIGIDLGGKFTGVCLS

SEQ ID NO: 339 - protein, 22 aa, Legionella pneumophila
AQRRATRHRVRNKKRNQFVKRV

SEQ ID NO: 340 - protein, 13 aa, Legionella pneumophila
LIPIYLEQNRFEF

SEQ ID NO: 341 - protein, 15 aa, Legionella pneumophila
PSHAIDATLTMSIGL

SEQ ID NO: 342 - protein, 18 aa, Francisella tularensis
ILPIAIDLGVKNTGVFSA

SEQ ID NO: 343 - protein, 22 aa, Francisella tularensis
NNRTARRHQRRGIDRKQLVKRL

SEQ ID NO: 344 - protein, 13 aa, Francisella tularensis
HIPIITESNAFEF

SEQ ID NO: 345 - protein, 16 aa, Francisella tularensis
YSHLIDAMLAFCIAAD

SEQ ID NO: 346 - protein, 18 aa, Streptococcus pyogenes
KYSIGLDIGTNSVGWAVI

SEQ ID NO: 347 - protein, 22 aa, Streptococcus pyogenes
EATRLKRTARRRYTRRKNRICY

SEQ ID NO: 348 - protein, 13 aa, Streptococcus pyogenes
PENIVIEMARENQ

SEQ ID NO: 349 - protein, 16 aa, Streptococcus pyogenes
YHHAHDAYLNAVVGTA

SEQ ID NO: 350 - protein, 18 aa, Lactobacillus delbrueckii
KVSLGVDTGQRHIGFAIV

SEQ ID NO: 351 - protein, 23 aa, Lactobacillus delbrueckii
YTRKIYRRSKRNRKTRYRQARFL

SEQ ID NO: 352 - protein, 13 aa, Lactobacillus delbrueckii
NPDLHIEVGKFDM

SEQ ID NO: 353 - protein, 15 aa, Lactobacillus delbrueckii
KGHFMDAIAISGIKP

SEQ ID NO: 354 - protein, 18 aa, Methanohalobium evestigatum
PVVAGMDSGSKHIGCAAV

SEQ ID NO: 355 - protein, 23 aa, Methanohalobium evestigatum
KDRADYRRNRRSRKTRYRKPRFD

SEQ ID NO: 356 - protein, 13 aa, Methanohalobium evestigatum
VKKWIVETASFDI

SEQ ID NO: 357 - protein, 15 aa, Methanohalobium evestigatum
KTHYNDAVAICCDEN

SEQ ID NO: 358 - protein, 18 aa, Clostridium botulinum
PITLGIDSGYLNIGFSAI

SEQ ID NO: 359 - protein, 22 aa, Clostridium botulinum
KEKAMYRRQRRSRLRYRKPRFN

SEQ ID NO: 360 - protein, 13 aa, Clostridium botulinum
ITNIIIEVANFDT

SEQ ID NO: 361 - protein, 15 aa, Clostridium botulinum
KTHYNDAFCIAGSSN

SEQ ID NO: 362 - protein, 18 aa, Geobacillus thermoleovorans
PVSLGVDMGTRHVGISAT

SEQ ID NO: 363 - protein, 23 aa, Geobacillus thermoleovorans
AIRRQFRRSRRNRKTRYREARFL

SEQ ID NO: 364 - protein, 13 aa, Geobacillus thermoleovorans
VTSVTIEVAAFDT

SEQ ID NO: 365 - protein, 15 aa, Geobacillus thermoleovorans
KSHMVDARCISGNPL

SEQ ID NO: 366 - protein, 18 aa, Ammonifex degensii
SLRAKVDDGSRYVGIALV

SEQ ID NO: 367 - protein, 23 aa, Ammonifex degensii
TLRREYRRGRRYRIVRHRPCRNR

SEQ ID NO: 368 - protein, 13 aa, Ammonifex degensii
ISGVDVELVSSGV

SEQ ID NO: 369 - protein, 15 aa, Ammonifex degensii
KSHTNDALSLFLPGG

SEQ ID NO: 370 - protein, 18 aa, Polaromonas sp.
PLRIKLDPGSKTTGVALV

SEQ ID NO: 371 - protein, 22 aa, Polaromonas sp.
TARRQMRRRRRSNLRCRAPRFL

SEQ ID NO: 372 - protein, 13 aa, Polaromonas sp.
VRAISSELVRFDM

SEQ ID NO: 373 - protein, 15 aa, Polaromonas sp.
KTHALDAACVGQVRF

SEQ ID NO: 374 - protein, 18 aa, Anabaena variabilis
DLRIKLDPGAKITGIALV

SEQ ID NO: 375 - protein, 23 aa, Anabaena variabilis
ISRRQLRRTRRNRKTRYRKPRFL

SEQ ID NO: 376 - protein, 13 aa, Anabaena variabilis
ITAISTELVKFDM

SEQ ID NO: 377 - protein, 15 aa, Anabaena variabilis
KTHWLDAACVGQSTP

SEQ ID NO: 378 - protein, 18 aa, Nostoc sp.
PLRLKFDPGAKYTGIALV

SEQ ID NO: 379 - protein, 23 aa, Nostoc sp.
TSRRQLRRSRRSRKTRYRQPRFF

SEQ ID NO: 380 - protein, 13 aa, Nostoc sp.
ITAISQELVKFDT

SEQ ID NO: 381 - protein, 15 aa, Nostoc sp.
KSHWLDACCVGASTP

SEQ ID NO: 382 - protein, 18 aa, Thermus thermophilus
MVVAGIDPGITHLGLGVV

SEQ ID NO: 383 - protein, 13 aa, Thermus thermophilus
PEAVAVEEQFFYR

SEQ ID NO: 384 - protein, 15 aa, Thermus thermophilus
PSHLADALAIALTHA

SEQ ID NO: 385 - protein, 18 aa, Thermus thermophilus
MVVAGIDPGITHLGLGVV

SEQ ID NO: 386 - protein, 13 aa, Thermus thermophilus
PEAVAVEEQFFYR

SEQ ID NO: 387 - protein, 15 aa, Thermus thermophilus
PSHLADALAIALTHA

SEQ ID NO: 388 - protein, 18 aa, Campylobacter jejuni
ARILAFDIGISSIGWAFS

SEQ ID NO: 389 - protein, 22 aa, Campylobacter jejuni
LPRRLARSARKRLARRKARLNH

SEQ ID NO: 390 - protein, 13 aa, Campylobacter jejuni
VHKINIELAREVG

SEQ ID NO: 391 - protein, 16 aa, Campylobacter jejuni
LHHAIDAVIIAYANNS

SEQ ID NO: 392 - protein, 18 aa, Clostridium perfringens
NYALGLDIGITSVGWAVI

SEQ ID NO: 393 - protein, 22 aa, Clostridium perfringens
LPRRLARGRRRLLRRKAYRVER

SEQ ID NO: 394 - protein, 13 aa, Clostridium perfringens
PVRINIELARDLA

SEQ ID NO: 395 - protein, 16 aa, Clostridium perfringens
KHHALDAAVVGVTTQG

SEQ ID NO: 396 - protein, 18 aa, Akkermansia muciniphila
SLTFSFDIGYASIGWAVI

SEQ ID NO: 397 - protein, 22 aa, Akkermansia muciniphila
FKRREYRRLRRNIRSRRVRIER

SEQ ID NO: 398 - protein, 13 aa, Akkermansia muciniphila
ISRVCVEVGKELT

SEQ ID NO: 399 - protein, 16 aa, Akkermansia muciniphila
LHHALDACVLGLIPYI

SEQ ID NO: 400 - protein, 18 aa, Bifidobacterium longum
RYRIGIDVGLNSVGLAAV

SEQ ID NO: 401 - protein, 22 aa, Bifidobacterium longum
NMSGVARRTRRMRRRKRERLHK

SEQ ID NO: 402 - protein, 13 aa, Bifidobacterium longum
PVSVNIEHVRSSF

SEQ ID NO: 403 - protein, 16 aa, Bifidobacterium longum
RHHAVDASVIAMMNTA

SEQ ID NO: 404 - protein, 18 aa, Wolinella succinogenes
VSPISVDLGGKNTGFFSF

SEQ ID NO: 405 - protein, 22 aa, Wolinella succinogenes
VGRRSKRHSKRNNLRNKLVKRL

SEQ ID NO: 406 - protein, 13 aa, Wolinella succinogenes
KVPIILEQNAFEY

SEQ ID NO: 407 - protein, 16 aa, Wolinella succinogenes
SSHAIDAVMAFVARYQ

SEQ ID NO: 408 - protein, 18 aa, Legionella pneumophila
LSPIGIDLGGKFTGVCLS

SEQ ID NO: 409 - protein, 22 aa, Legionella pneumophila
AQRRATRHRVRNKKRNQFVKRV

SEQ ID NO: 410 - protein, 13 aa, Legionella pneumophila
LIPIYLEQNRFEF

SEQ ID NO: 411 - protein, 15 aa, Legionella pneumophila
PSHAIDATLTMSIGL

SEQ ID NO: 412 - protein, 18 aa, Francisella tularensis
ILPIAIDLGVKNTGVFSA

SEQ ID NO: 413 - protein, 22 aa, Francisella tularensis
NNRTARRHQRRGIDRKQLVKRL

SEQ ID NO: 414 - protein, 13 aa, Francisella tularensis
HIPIITESNAFEF

SEQ ID NO: 415 - protein, 16 aa, Francisella tularensis
YSHLIDAMLAFCIAAD

SEQ ID NO: 416 - protein, 18 aa, Streptococcus pyogenes
KYSIGLDIGTNSVGWAVI

SEQ ID NO: 417 - protein, 22 aa, Streptococcus pyogenes
EATRLKRTARRRYTRRKNRICY

SEQ ID NO: 418 - protein, 13 aa, Streptococcus pyogenes
PENIVIEMARENQ

SEQ ID NO: 419 - protein, 16 aa, Streptococcus pyogenes
YHHAHDAYLNAVVGTA

SEQ ID NO: 420 - protein, 18 aa, Unknown
  source: /note="Description of Unknown: Candidatus Methanomethylophilus alvus sequence"
LKIIGIDRGERNLIYVTM

SEQ ID NO: 421 - protein, 22 aa, Unknown
  source: /note="Description of Unknown: Candidatus Methanomethylophilus alvus sequence"
RKALDVREYDNKEARRNWTKVE

SEQ ID NO: 422 - protein, 13 aa, Unknown
  source: /note="Description of Unknown: Candidatus Methanomethylophilus alvus sequence"
NAIIVMEDLNHGF

SEQ ID NO: 423 - protein, 16 aa, Unknown
  source: /note="Description of Unknown: Candidatus Methanomethylophilus alvus sequence"
LPQDSDANGAYNIALK

SEQ ID NO: 424 - protein, 18 aa, Synergistes jonesii
VNIIGIDRGERNLVYVSL

SEQ ID NO: 425 - protein, 22 aa, Synergistes jonesii
HAKLNQKEKERDTARKSWKTIG

SEQ ID NO: 426 - protein, 13 aa, Synergistes jonesii
NAVIVMEDLNIGF

SEQ ID NO: 427 - protein, 16 aa, Synergistes jonesii
LPIDADANGAYHIALK

SEQ ID NO: 428 - protein, 18 aa, Unknown
  source: /note="Description of Unknown: Lachnospiraceae bacterium sequence"
PYVIGIDRGERNLLYIVV

SEQ ID NO: 429 - protein, 22 aa, Unknown
  source: /note="Description of Unknown: Lachnospiraceae bacterium sequence"
HSLLDKKEKERFEARQNWTSIE

SEQ ID NO: 430 - protein, 13 aa, Unknown
  source: /note="Description of Unknown: Lachnospiraceae bacterium sequence"
DAVIALEDLNSGF

SEQ ID NO: 431 - protein, 16 aa, Unknown
  source: /note="Description of Unknown: Lachnospiraceae bacterium sequence"
LPKNADANGAYNIARK

SEQ ID NO: 432 - protein, 18 aa, Francisella tularensis
VHILSIDRGERHLAYYTL

SEQ ID NO: 433 - protein, 22 aa, Francisella tularensis
HDKLAAIEKDRDSARKDWKKIN

SEQ ID NO: 434 - protein, 13 aa, Francisella tularensis
NAIVVFEDLNFGF

SEQ ID NO: 435 - protein, 16 aa, Francisella tularensis
MPQDADANGAYHIGLK

SEQ ID NO: 436 - protein, 18 aa, Moraxella caprae
VNVIGIDRGERHLLYLTV

SEQ ID NO: 437 - protein, 22 aa, Moraxella caprae
HKILDKREIERLNARVGWGEIE

SEQ ID NO: 438 - protein, 13 aa, Moraxella caprae
NAIVVLEDLNFGF

SEQ ID NO: 439 - protein, 16 aa, Moraxella caprae
QPQNADANGAYHIALK

SEQ ID NO: 440 - protein, 18 aa, Unknown
  source: /note="Description of Unknown: Lachnospiraceae bacterium sequence"
MHIIGIDRGERNLIYLCM

SEQ ID NO: 441 - protein, 22 aa, Unknown
  source: /note="Description of Unknown: Lachnospiraceae bacterium sequence"
HQLLKTREDENKSARQSWQTIH

SEQ ID NO: 442 - protein, 13 aa, Unknown
  source: /note="Description of Unknown: Lachnospiraceae bacterium sequence"
NAIVVLEDLNFGF

SEQ ID NO: 443 - protein, 16 aa, Unknown
  source: /note="Description of Unknown: Lachnospiraceae bacterium sequence"
MPLDADANGAYNIARK

SEQ ID NO: 444 - protein, 18 aa, Prevotella albensis
THIIGIDRGERHLLYLSL

SEQ ID NO: 445 - protein, 22 aa, Prevotella albensis
HNLLEKREKERTEARHSWSSIE

SEQ ID NO: 446 - protein, 13 aa, Prevotella albensis
NAIVVLEDLNGGF

SEQ ID NO: 447 - protein, 16 aa, Prevotella albensis
FPENADANGAYNIARK

SEQ ID NO: 448 - protein, 18 aa, Smithella sp.
INIIGIDRGERHLLYYAL

SEQ ID NO: 449 - protein, 22 aa, Smithella sp.
HNLLDKKEGDRATARQEWGVIE

SEQ ID NO: 450 - protein, 13 aa, Smithella sp.
NAIIVMEDLNFGF

SEQ ID NO: 451 - protein, 16 aa, Smithella sp.
MPKNADANGAYHIALK

SEQ ID NO: 452 - protein, 18 aa, Porphyromonas crevioricanis
MHVIGIDRGERNLLYICV

SEQ ID NO: 453 - protein, 22 aa, Porphyromonas crevioricanis
HDLLESRDKDRQQERRNWQTIE

SEQ ID NO: 454 - protein, 13 aa, Porphyromonas crevioricanis
KAVVALEDLNMGF

SEQ ID NO: 455 - protein, 16 aa, Porphyromonas crevioricanis
LPKDADANGAYNIALK

SEQ ID NO: 456 - protein, 18 aa, Alicyclobacillus acidoterrestris
LRVMSVDLGLRTSASISV

SEQ ID NO: 457 - protein, 22 aa, Alicyclobacillus acidoterrestris
QRTLRQLRTQLAYLRLLVRCGS

SEQ ID NO: 458 - protein, 12 aa, Alicyclobacillus acidoterrestris
CQLILLEELSEY

SEQ ID NO: 459 - protein, 16 aa, Alicyclobacillus acidoterrestris
HQIHADLNAAQNLQQR

SEQ ID NO: 460 - protein, 18 aa, Alicyclobacillus contaminans
VRVMSVDLGVRYGAAISV

SEQ ID NO: 461 - protein, 22 aa, Alicyclobacillus contaminans
KQALAAIRAEMSILRKWLRVSQ

SEQ ID NO: 462 - protein, 12 aa, Alicyclobacillus contaminans
CDLILFEDLSRY

SEQ ID NO: 463 - protein, 16 aa, Alicyclobacillus contaminans
KCVHADINAAHNLQRR

SEQ ID NO: 464 - protein, 18 aa, Desulfovibrio inopinatus
LRVLSVDLGMRTFASCSV

SEQ ID NO: 465 - protein, 22 aa, Desulfovibrio inopinatus
RAEIYALKRDIQRLKSLLRLGE

SEQ ID NO: 466 - protein, 12 aa, Desulfovibrio inopinatus
CQLILFEDLARY

SEQ ID NO: 467 - protein, 16 aa, Desulfovibrio inopinatus
CVIHADMNAAQNLQRR

SEQ ID NO: 468 - protein, 18 aa, Desulfonatronum thiodismutans
LRVLSVDLGVRSFAACSV

SEQ ID NO: 469 - protein, 22 aa, Desulfonatronum thiodismutans
MEELRSLNGDIRRLKAILRLSV

SEQ ID NO: 470 - protein, 12 aa, Desulfonatronum thiodismutans
CRLILFEDLARY

SEQ ID NO: 471 - protein, 16 aa, Desulfonatronum thiodismutans
HVIHADINAAQNLQRR

SEQ ID NO: 472 - protein, 18 aa, Tuberibacillus calidus
LRVMSVDLGQRQAAAISI

SEQ ID NO: 473 - protein, 22 aa, Tuberibacillus calidus
DQAIRDLSRKLKFLKNVLNMQK

SEQ ID NO: 474 - protein, 12 aa, Tuberibacillus calidus
CQLVLFEDLSRY

SEQ ID NO: 475 - protein, 16 aa, Tuberibacillus calidus
VITHADINAAQNLQKR

SEQ ID NO: 476 - protein, 18 aa, Bacillus thermoamylovorans
LRVMSIDLGQRQAAAASI

SEQ ID NO: 477 - protein, 22 aa, Bacillus thermoamylovorans
EDNLKLMNQKLNFLRNVLHFQQ

SEQ ID NO: 478 - protein, 12 aa, Bacillus thermoamylovorans
CQIILFEDLSNY

SEQ ID NO: 479 - protein, 16 aa, Bacillus thermoamylovorans
VTTHADINAAQNLQKR

SEQ ID NO: 480 - protein, 18 aa, Bacillus sp.
FRVMSIDLGLRAAAATSI

SEQ ID NO: 481 - protein, 22 aa, Bacillus sp.
FQLHQRVKFQIRVLAQIMRMAN

SEQ ID NO: 482 - protein, 12 aa, Bacillus sp.
CQVILFENLSQY

SEQ ID NO: 483 - protein, 16 aa, Bacillus sp.
VFLQADINAAHNLQKR

SEQ ID NO: 484 - protein, 18 aa, Methylobacterium nodulans
LRVLSIDLGVRSFATCSV

SEQ ID NO: 485 - protein, 22 aa, Methylobacterium nodulans
DAELRQLRGGLNRHRQLLRAAT

SEQ ID NO: 486 - protein, 12 aa, Methylobacterium nodulans
CHVILFEDLSRY

SEQ ID NO: 487 - protein, 16 aa, Methylobacterium nodulans
SRIHADINAAQNLQRR

SEQ ID NO: 488 - protein, 18 aa, Unknown
  source: /note="Description of Unknown: Gut metagenome sequence"
KNIVSIDQGEAGFAYAVF

SEQ ID NO: 489 - protein, 22 aa, Unknown
  source: /note="Description of Unknown: Gut metagenome sequence"
HSVKKYRGKKQRIQNFNQKFDS

SEQ ID NO: 490 - protein, 13 aa, Unknown
  source: /note="Description of Unknown: Gut metagenome sequence"
NAFPILEKQVGNL

SEQ ID NO: 491 - protein, 16 aa, Unknown
  source: /note="Description of Unknown: Gut metagenome sequence"
KEQHADVNAAINIGRR

SEQ ID NO: 492 - protein, 18 aa, Unknown
  source: /note="Description of Unknown: Marine metagenome sequence"
DHIVAIDLGERSVGFAVF

SEQ ID NO: 493 - protein, 22 aa, Unknown
  source: /note="Description of Unknown: Marine metagenome sequence"
KAVRSHRRRRQPNQKVNQTYST

SEQ ID NO: 494 - protein, 13 aa, Unknown
  source: /note="Description of Unknown: Marine metagenome sequence"
NAFPVLEFQIKNF

SEQ ID NO: 495 - protein, 16 aa, Unknown
  source: /note="Description of Unknown: Marine metagenome sequence"
WTGHADENAAINIGRR

SEQ ID NO: 496 - protein, 18 aa, Unknown
  source: /note="Description of Unknown: Metagenome sequence"
DRIVAIDLGERKIGYAIF

SEQ ID NO: 497 - protein, 22 aa, Unknown
  source: /note="Description of Unknown: Metagenome sequence"
KAVQTHRNRRQPNYRIDQTYSK

SEQ ID NO: 498 - protein, 13 aa, Unknown
  source: /note="Description of Unknown: Metagenome sequence"
GGFPVLESSVRNF

SEQ ID NO: 499 - protein, 16 aa, Unknown
  source: /note="Description of Unknown: Metagenome sequence"
HECHADENAAINIGRK

SEQ ID NO: 500 - protein, 18 aa, Unknown
  source: /note="Description of Unknown: Marine metagenome sequence"
DHLLAIDLGEKRVGYAVY

SEQ ID NO: 501 - protein, 22 aa, Unknown
  source: /note="Description of Unknown: Marine metagenome sequence"
KAVRSHRQQRQPNQKVNQTYST

SEQ ID NO: 502 - protein, 13 aa, Unknown
  source: /note="Description of Unknown: Marine metagenome sequence"
NAFPVLESSVMNF

SEQ ID NO: 503 - protein, 16 aa, Unknown
  source: /note="Description of Unknown: Marine metagenome sequence"
FTGHADENAAINIGWK

SEQ ID NO: 504 - protein, 15 aa, Homo sapiens
IPDWIVDLRHELTHK

SEQ ID NO: 505 - protein, 15 aa, Homo sapiens
IPDWIVDLRHELTHK

SEQ ID NO: 506 - protein, 15 aa, Mycobacterium tuberculosis
LGRFESRVRNTAAHE

SEQ ID NO: 507 - protein, 15 aa, Mycobacterium tuberculosis
LGRFESRVRNTAAHE

SEQ ID NO: 508 - protein, 15 aa, Lactococcus lactis
WIRAGWRIRNRSAHY

SEQ ID NO: 509 - protein, 15 aa, Lactococcus lactis
WIRAGWFIRNRSAHY

SEQ ID NO: 510 - protein, 15 aa, Thermus thermophilus
  MOD_RES (5)..(5): Any amino acid
LALGXVDDRSLTVHT

SEQ ID NO: 511 - protein, 15 aa, Thermus thermophilus
  MOD_RES (5)..(5): Any amino acid
LALGXVDDRSLTVHT

SEQ ID NO: 512 - protein, 22 aa, Unknown
  source: /note="Description of Unknown: Lachnospiraceae bacterium sequence"
LKSMLYSMRNSSFHFSTENVDN

SEQ ID NO: 513 - protein, 14 aa, Unknown
  source: /note="Description of Unknown: Lachnospiraceae bacterium sequence"
FRNEIDHFHYFYDR

SEQ ID NO: 514 - protein, 22 aa, Unknown
  source: /note="Description of Unknown: Lachnospiraceae bacterium sequence"
LKDVIYSMRNDSFHYATENHNN

SEQ ID NO: 515 - protein, 14 aa, Unknown
  source: /note="Description of Unknown: Lachnospiraceae bacterium sequence"
LRNYIEHFRYYSSF

SEQ ID NO: 516 - protein, 22 aa, Clostridium aminophilum
LRKAIYSLRNETFHFTTLNKGS

SEQ ID NO: 517 - protein, 14 aa, Clostridium aminophilum
VRKYVDHFKYYATS

SEQ ID NO: 518 - protein, 22 aa, Unknown
  source: /note="Description of Unknown: Lachnospiraceae bacterium sequence"
IIQIIYSLRNKSFHFKTYDHGD

SEQ ID NO: 519 - protein, 14 aa, Unknown
  source: /note="Description of Unknown: Lachnospiraceae bacterium sequence"
LRKYVDHFKYYAYG

SEQ ID NO: 520 - protein, 22 aa, Carnobacterium gallinarum
LRGSVQQIRNEIFHSFDKNQKF

SEQ ID NO: 521 - protein, 14 aa, Carnobacterium gallinarum
IRNQTAHLSVLQLE

SEQ ID NO: 522 - protein, 21 aa, Carnobacterium gallinarum
IRGAVQRVRNQIFHQQINKRH

SEQ ID NO: 523 - protein, 14 aa, Carnobacterium gallinarum
IRNNIAHLHVLRND

SEQ ID NO: 524 - protein, 20 aa, Paludibacter propionicigenes
IRGAVQQIRNNVNHYKKDAL

SEQ ID NO: 525 - protein, 14 aa, Paludibacter propionicigenes
IRNHIAHFNYLTKD

SEQ ID NO: 526 - protein, 20 aa, Listeria seeligeri
LRGAIAPIRNEIIHLKKHSW

SEQ ID NO: 527 - protein, 14 aa, Listeria seeligeri
KRNNISHFNYLNGQ

SEQ ID NO: 528 - protein, 20 aa, Listeria weihenstephanensis
IRGSIQQIRNEVYHCKKHSW

SEQ ID NO: 529 - protein, 14 aa, Listeria weihenstephanensis
ARNHIAHLNYLSLK

SEQ ID NO: 530 - protein, 20 aa, Listeria newyorkens
IRGSIQQIRNEVYHCKKHSW

SEQ ID NO: 531 - protein, 14 aa, Listeria newyorkens
ARNHIAHLNYLSLK

SEQ ID NO: 532 - protein, 21 aa, Leptotrichia wadei
ISYSIYNVRNGVGHFNKLILG

SEQ ID NO: 533 - protein, 14 aa, Leptotrichia wadei
FRNYIAHFLHLHTK

SEQ ID NO: 534 - protein, 21 aa, Leptotrichia wadei
MLNAITSIRHRVVHYNMNTNS

SEQ ID NO: 535 - protein, 14 aa, Leptotrichia wadei
IRNYIAHFNYIPDA

SEQ ID NO: 536 - protein, 21 aa, Leptotrichia wadei
IDEAISSIRHGIVHFNLELEG

SEQ ID NO: 537 - protein, 14 aa, Leptotrichia wadei
IRNYIAHFNYIPHA

SEQ ID NO: 538 - protein, 22 aa, Rhodobacter capsulatus
LLRYLRGCRNQTFHLGARAGFL

SEQ ID NO: 539 - protein, 21 aa, Leptotrichia buccalis
IDEAISSIRHGIVHFNLELEG

SEQ ID NO: 540 - protein, 14 aa, Rhodobacter capsulatus
TRKDLAHFNVLDRA

SEQ ID NO: 541 - protein, 21 aa, Leptotrichia sp.
IDEAISSIRHGIVHFNLELEG

SEQ ID NO: 542 - protein, 14 aa, Leptotrichia buccalis
IRNYIAHFNYIPHA

SEQ ID NO: 543 - protein, 16 aa, Leptotrichia sp.
FQKEGYLLRNKILHNS

SEQ ID NO: 544 - protein, 14 aa, Leptotrichia sp.
IRNYIAHFNYIPNA

SEQ ID NO: 545 - protein, 15 aa, Leptotrichia shahii
FTKIGTNERNRILHA

SEQ ID NO: 546 - protein, 14 aa, Leptotrichia sp.
IRNYISHFYIVRNP

SEQ ID NO: 547 - protein, 14 aa, Leptotrichia shahii
IRNYISHFYIVRNP

SEQ ID NO: 548 - protein, 1129 aa, Alicyclobacillus acidoterrestris
MAVKSIKVKLRLDDMPEIRAGLWKLHKEVNAGVRYYTEWLSLLRQENLYRRSPNGDGEQECDKTAEECKAELLERLRARQVENGHRGPAGSDDELLQLARQLYELLVPQAIGAKGDAQQIARKFLSPLADKDAVGGLGIAKAGNKPRWVRMREAGEPGWEEEKEKAETRKSADRTADVLRALADFGLKPLMRVYTDSEMSSVEWKPLRKGQAVRTWDRDMFQQAIERMMSWESWNQRVGQEYAKLVEQKNRFEQKNFVGQEHLVHLVNQLQQDMKEASPGLESKEQTAHYVTGRALRGSDKVFEKWGKLAPDAPFDLYDAEIKNVQRRNTRRFGSHDLFAKLAEPEYQALWREDASFLTRYAVYNSILRKLNHAKMFATFTLPDATAHPIWTRFDKLGGNLHQYTFLFNEFGERRHAIRFHKLLKVENGVAREVDDVTVPISMSEQLDNLLPRDPNEPIALYFRDYGAEQHFTGEFGGAKIQCRRDQLAHMHRRRGARDVYLNVSVRVQSQSEARGERRPPYAAVFRLVGDNHRAFVHFDKLSDYLAEHPDDGKLGSEGLLSGLRVMSVDLGLRTSASISVFRVARKDELKPNSKGRVPFFFPIKGNDNLVAVHERSQLLKLPGETESKDLRAIREERQRTLRQLRTQLAYLRLLVRCGSEDVGRRERSWAKLIEQPVDAANHMTPDWREAFENELQKLKSLHGICSDKEWMDAVYESVRRVWRHMGKQVRDWRKDVRSGERPKIRGYAKDVVGGNSIEQIEYLERQYKFLKSWSFFGKVSGQVIRAEKGSRFAITLREHIDHAKEDRLKKLADRIIMEALGYVYALDERGKGKWVAKYPPCQLILLEELSEYQFNNDRPPSENNQLMQWSHRGVFQELINQAQVHDLLVGTMYAAFSSRFDARTGAPGIRCRRVPARCTQEHNPEPFPWWLNKFVVEHTLDACPLRADDLIPTGEGEIFVSPFSAEEGDFHQIHADLNAAQNLQQRLWSDFDISQIRLRCDWGEVDGELVLIPRLTGKRTADSYSNKVFYTNTGVTYYERERGKKRRKVFAQEKLSEEEAELLVEADEAREKSVVLMRDPSGIINRGNWTRQKEFWSMVNQRIEGYLVKQIRSRVPLQDSACENTGDI

SEQ ID NO: 549 - protein, 872 aa, Alicyclobacillus contaminans
MGFNTAELLRKVEEEMRKTSVGFDTDNPFAHRITRRAIRGWDRIAEAWRRLPPDAPESEYIEAFKDIQRKNPRKIGSEPLFKNLAAPGVRSELLNNPQVLITFAKYNELQRQLAKAKQFAQKTLPHPVFHPVWVRYDKLGGNLHHYQIEPAVHANDTHKVKFSSLLLPQEDGSYAEVKDVTVSLAPSLQFPTGLVHPKVTTPPRTGLVTVMDEEAGKPVVCYRDRGHDALVPVAFGGAKLQFNRAHLSAGYRKGVLSAGGGGSIYFNVTLDVQVPNERDVSKTFSFSRDRDLVSLKAEELKRYMETKPLGMPGVRVMSVDLGVRYGAAISVFEVKPFAEVRKDKLHYPITGCEGFVAEHERSVILKLPGEGVRTAGKQSERKQALAAIRAEMSILRKWLRVSQVTEEDRAKAVRGLLEDERGGGWTMDPGEDSDHQPLQQFLHEARLAVGELVNLVHLSPAEWERAVIERHRRLERITASHIRVFQTMRKVWGKRRNEDAAHTGGISLAHIEHLIQQRKLFIRWSTHARTYGEVRRLPKHEGFAKRLQKHTNHVKEDRIKKLADMIVMAARGYRFLDKRARWVKTRHAPCDLILFEDLSRYRFTMDRPPTENSQLMNWSHRELLKTVKMQAALFGIGVGTVPAAFTSRFDAQTGAPGLRCKRVTKQDKEKTPFWLIQFAEITGVNVTNVEPGQLIPVDGGEWFVSPKGPRAADGLKCVHADINAAHNLQRRFWIPRLPSVKCRRYVEAEGFAAVPSSTAFMKVHGKGAFVSVDGEFYEYQKGRRVAVNRADRTSSTLDEDEGDIGEEMLVSSNGAGEFVRMFYDESGYVGYGRWMDSKVFWGKVRQIVHRAIQDQVEKRAAARGENGATSSR

SEQ ID NO: 550 - protein, 1149 aa, Desulfovibrio inopinatus
MPTRTINLKLVLGKNPENATLRRALFSTHRLVNQATKRIEEFLLLCRGEAYRTVDNEGKEAEIPRHAVQEEALAFAKAAQRHNGCISTYEDQEILDVLRQLYERLVPSVNENNEAGDAQAANAWVSPLMSAESEGGLSVYDKVLDPPPVWMKLKEEKAPGWEAASQIWIQSDEGQSLLNKPGSPPRWIRKLRSGQPWQDDFVSDQKKKQDELTKGNAPLIKQLKEMGLLPLVNPFFRHLLDPEGKGVSPWDRLAVRAAVAHFISWESWNHRTRAEYNSLKLRRDEFEAASDEFKDDFTLLRQYEAKRHSTLKSIALADDSNPYRIGVRSLRAWNRVREEWIDKGATEEQRVTILSKLQTQLRGKFGDPDLFNWLAQDRHVHLWSPRDSVTPLVRINAVDKVLRRRKPYALMTFAHPRFHPRWILYEAPGGSNLRQYALDCTENALHITLPLLVDDAHGTWIEKKIRVPLAPSGQIQDLTLEKLEKKKNRLYYRSGFQQFAGLAGGAEVLFHRPYMEHDERSEESLLERPGAVWFKLTLDVATQAPPNWLDGKGRVRTPPEVHHFKTALSNKSKHTRTLQPGLRVLSVDLGMRTFASCSVFELIEGKPETGRAFPVADERSMDSPNKLWAKHERSFKLTLPGETPSRKEEEERSIARAEIYALKRDIQRLKSLLRLGEEDNDNRRDALLEQFFKGWGEEDVVPGQAFPRSLFQGLGAAPFRSTPELWRQHCQTYYDKAEACLAKHISDWRKRTRPRPTSREMWYKTRSYHGGKSIWMLEYLDAVRKLLLSWSLRGRTYGAINRQDTARFGSLASRLLHHINSLKEDRIKTGADSIVQAARGYIPLPHGKGWEQRYEPCQLILFEDLARYRFRVDRPRRENSQLMQWNHRAIVAETTMQAELYGQIVENTAAGFSSRFHAATGAPGVRCRFLLERDFDNDLPKPYLLRELSWMLGNTKVESEEEKLRLLSEKIRPGSLVPWDGGEQFATLHPKRQTLCVIHADMNAAQNLQRRFFGRCGEAFRLVCQPHGDDVLRLASTPGARLLGALQQLENGQGAFELVRDMGSTSQMNRFVMKSLGKKKIKPLQDNNGDDELEDVLSVLPEEDDTGRITVFRDSSGIFFPCNVWIPAKQFWPAVRAMIWKVMASHSLG

SEQ ID NO: 551 - protein, 1194 aa, Desulfonatronum thiodismutans
MVLGRKDDTAELRRALWTTHEHVNLAVAEVERVLLRCRGRSYWTLDRRGDPVHVPESQVAEDALAMAREAQRRNGWPVVGEDEEILLALRYLYEQIVPSCLLDDLGKPLKGDAQKIGTNYAGPLFDSDTCRRDEGKDVACCGPFHEVAGKYLGALPEWATPISKQEFDGKDASHLRFKATGGDDAFFRVSIEKANAWYEDPANQDALKNKAYNKDDWKKEKDKGISSWAVKYIQKQLQLGQDPRTEVRRKLWLELGLLPLFIPVFDKTMVGNLWNRLAVRLALAHLLSWESWNHRAVQDQALARAKRDELAALFLGMEDGFAGLREYELRRNESIKQHAFEPVDRPYVVSGRALRSWTRVREEWLRHGDTQESRKNICNRLQDRLRGKFGDPDVFHWLAEDGQEALWKERDCVTSFSLLNDADGLLEKRKGYALMTFADARLHPRWAMYEAPGGSNLRTYQIRKTENGLWADVVLLSPRNESAAVEEKTFNVRLAPSGQLSNVSFDQIQKGSKMVGRCRYQSANQQFEGLLGGAEILFDRKRIANEQHGATDLASKPGHVWFKLTLDVRPQAPQGWLDGKGRPALPPEAKHFKTALSNKSKFADQVRPGLRVLSVDLGVRSFAACSVFELVRGGPDQGTYFPAADGRTVDDPEKLWAKHERSFKITLPGENPSRKEEIARRAAMEELRSLNGDIRRLKAILRLSVLQEDDPRTEHLRLFMEAIVDDPAKSALNAELFKGFGDDRFRSTPDLWKQHCHFFHDKAEKVVAERFSRWRTETRPKSSSWQDWRERRGYAGGKSYWAVTYLEAVRGLILRWNMRGRTYGEVNRQDKKQFGTVASALLHHINQLKEDRIKTGADMIIQAARGFVPRKNGAGWVQVHEPCRLILFEDLARYRFRTDRSRRENSRLMRWSHREIVNEVGMQGELYGLHVDTTEAGFSSRYLASSGAPGVRCRHLVEEDFHDGLPGMHLVGELDWLLPKDKDRTANEARRLLGGMVRPGMLVPWDGGELFATLNAASQLHVIHADINAAQNLQRRFWGRCGEAIRIVCNQLSVDGSTRYEMAKAPKARLLGALQQLKNGDAPFHLTSIPNSQKPENSYVMTPTNAGKKYRAGPGEKSSGEEDELALDIVEQAEELAQGRKTFFRDPSGVFFAPDRWLPSEIYWSRIRRRIWQVTLERNSSGRQERAEMDEMPY

SEQ ID NO: 552 - protein, 1388 aa, Unknown; identical to SEQ ID NO: 29
  source: /note="Description of Unknown: Opitutaceae bacterium sequence"

SEQ ID NO: 553 - protein, 1132 aa, Tuberibacillus calidus
MATKSFILKMKTKNNPQLRLSLWKTHELFNFGVAYYMDLLSLFRQKDLYMHNDEDPDHPVVLKKEEIQERLWMKVRETQQKNGFHGEVSKDEVLETLRALYEELVPSAVGKSGEANQISNKYLYPLTDPASQSGKGTANSGRKPRWKKLKEAGDPSWKDAYEKWEKERQEDPKLKILAALQSFGLIPLFRPFTENDHKAVISVKWMPKSKNQSVRKFDKDMFNQAIERFLSWESWNEKVAEDYEKTVSIYESLQKELKGISTKAFEIMERVEKAYEAHLREITFSNSTYRIGNRAIRGWTEIVKKWMKLDPSAPQGNYLDVVKDYQRRHPRESGDFKLFELLSRPENQAAWREYPEFLPLYVKYRHAEQRMKTAKKQATFTLCDPIRHPLWVRYEERSGTNLNKYRLIMNEKEKVVQFDRLICLNADGHYEEQEDVTVPLAPSQQFDDQIKFSSEDTGKGKHNFSYYHKGINYELKGTLGGARIQFDREHLLRRQGVKAGNVGRIFLNVTLNIEPMQPFSRSGNLQTSVGKALKVYVDGYPKVVNFKPKELTEHIKESEKNTLTLGVESLPTGLRVMSVDLGQRQAAAISIFEVVSEKPDDNKLFYPVKDTDLFAVHRTSFNIKLPGEKRTERRMLEQQKRDQAIRDLSRKLKFLKNVLNMQKLEKTDEREKRVNRWIKDREREEENPVYVQEFEMISKVLYSPHSVWVDQLKSIHRKLEEQLGKEISKWRQSISQGRQGVYGISLKNIEDIEKTRRLLFRWSMRPENPGEVKQLQPGERFAIDQQNHLNHLKDDRIKKLANQIVMTALGYRYDGKRKKWIAKHPACQLVLFEDLSRYAFYDERSRLENRNLMRWSRREIPKQVAQIGGLYGLLVGEVGAQYSSRFHAKSGAPGIRCRVVKEHELYITEGGQKVRNQKFLDSLVENNIIEPDDARRLEPGDLIRDQGGDKFATLDERGELVITHADINAAQNLQKRFWTRTHGLYRIRCESREIKDAVVLVPSDKDQKEKMENLFGIGYLQPFKQENDVYKWVKGEKIKGKKTSSQSDDKELVSEILQEASVMADELKGNRKTLFRDPSGYVFPKDRWYTGGRYFGTLEHLLKRKLAERRLFDGGSSRRGLFNGTDSNTNVE

SEQ ID NO: 554 - protein, 1108 aa, Bacillus thermoamylovorans; identical to SEQ ID NO: 32

SEQ ID NO: 555 - protein, 864 aa, Brevibacillus sp.
MPKILRGHKWISLLEQYEENRERELRENMTAANDKYRITKRQMKGWNELYELWSTFPASASHEQYKEALKRVQQRLRGRFGDAHFFQYLMEEKNRLIWKGNPQRIHYFVARNELTKRLEEAKQSATMTLPNARKHPLWVRFDARGGNLQDYYLTAEADKPRSRRFVTFSQLIWPSESGWMEKKDVEVELALSRQFYQQVKLLKNDKGKQKIEFKDKGSGSTFNGHLGGAKLQLERGDLEKEEKNFEDGEIGSVYLNVVIDFEPLQEVKNGRVQAPYGQVLQLIRRPNEFPKVTTYKSEQLVEWIKASPQHSAGVESLASGFRVMSIDLGLRAAAATSIFSVEESSDKNAADFSYWIEGTPLVAVHHRSYMLRLPGEQVEKQVMEKRDERFQLHQRVKFQIRVLAQIMRMANKQYGDRWDELDSLKQAVEQKKSPLDQTDRTFWEGIVCDLTKVLPRNEADWEQAVVQIHRKAEEYVGKAVQAWRKRFAADERKGIAGLSMWNIEELEGLRKLLISWSRRSRNPQEVNRFERGHTSHQRLLTHIQNVKEDRLKQLSHAIVMTALGYVYDERKQEWCAEYPACQVILFENLSQYRSNLDRSTKENSTLMKWAHRSIPKYVHMQAEPYGIQIGDVRAEYSSRFYAKTGTPGIRCKKVRGQDLQGRRFENLQKRLVNEQFLTEEQVKQLRPGDIVPDDSGELFMTLTDGSGSKEVVFLQADINAAHNLQKRFWQRYNELFKVSCRVIVRDEEEYLVPKTKSVQAKLGKGLFVKKSDTAWKDVYVWDSQAKLKGKTTFTEESESPEQLEDFQEIIEEAEEAKGTYRTLFRDPSGVFFPESVWYPQKDFWGEVKRKLYGKLRERFLTKAR

SEQ ID NO: 556 - protein, 1108 aa, Bacillus sp.; identical to SEQ ID NO: 35

SEQ ID NO: 557 - protein, 1489 aa, Desulfatirhabdium butyrativorans
MPLSNNPPVTQRAYTLRLRGADPSDLSWREALWHTHEAVNKGAKVFGDWLLTLRGGLDHTLADTKVKGGKGKPDRDPTPEERKARRILLALSWLSVESKLGAPSSYIVASGDEPAKDRNDNVVSALEEILQSRKVAKSEIDDWKRDCSASLSAAIRDDAVWVNRSKVFDEAVKSVGSSLTREEAWDMLERFFGSRDAYLTPMKDPEDKSSETEQEDKAKDLVQKAGQWLSSRYGTSEGADFCRMSDIYGKIAAWADNASQGGSSTVDDLVSELRQHFDTKESKATNGLDWIIGLSSYTGHTPNPVHELLRQNTSLNKSHLDDLKKKANTRAESCKSKIGSKGQRPYSDAILNDVESVCGFTYRVDKDGQPVSVADYSKYDVDYKWGTARHYIFAVMLDHAARRISLAHKWIKRAEAERHKFEEDAKRIANVPARAREWLDSFCKERSVTSGAVEPYRIRRRAVDGWKEVVAAWSKSDCKSTEDRIAAARALQDDSEIDKFGDIQLFEALAEDDALCVWHKDGEATNEPDFQPLIDYSLAIEAEFKKRQFKVPAYRHPDELLHPVFCDFGKSRWKINYDVHKNVQAPFYRGLCLTLWTGSEIKPVPLCWQSKRLTRDLALGNNHRNDAASAVTRADRLGRAASNVTKSDMVNITGLFEQADWNGRLQAPRQQLEAIAVVRDNPRLSEQERNLRMCGMIEHIRWLVTFSVKLQPQGPWCAYAEQHGLNTNPQYWPHADTNRDRKVHARLILPRLPGLRVLSVDLGHRYAAACAVWEAVNTETVKEACQNVGRDMPKEHDLYLHIKVKKQGIGKQTEVDKTTIYRRIGADTLPDGRPHPAPWARLDRQFLIKLQGEEKDAREASNEEIWALHQMECKLDRTKPLIDRLIASGWGLLKRQMARLDALKELGWIPAPDSSENLSREDGEAKDYRESLAVDDLMFSAVRTLRLALQRHGNRARIAYYLISEVKIRPGGIQEKLDENGRIDLLQDALALWHELFSSPGWRDEAAKQLWDSRIATLAGYKAPEENGDNVSDVAYRKKQQVYREQLRNVAKTLSGDVITCKELSDAWKERWEDEDQRWKKLLRWFKDWVLPSGTQANNATIRNVGGLSLSRLATITEFRRKVQVGFFTRLRPDGTRHEIGEQFGQKTLDALELLREQRVKQLASRIAEAALGIGSEGGKGWDGGKRPRQRINDSRFAPCHAVVIENLANYRPDETRTRLENRRLMTWSASKVHKYLSEACQLNGLYLCTVSAWYTSRQDSRTGAPGIRCQDVSVREFMQSPFWRKQVKQAEAKHDENKGDARERFLCELNKTWKAKTPAEWKKAGFVRIPLRGGEIFVSADSKSPSAKGIHADLNAAANIGLRALTDPDWPGKWWYVPCDPVSFESKMDYVKGCAAVKVGQPLRQPAQTNADGAASKIRKGKKNRTAGTSKEKVYLWRDISAFPLESNEIGEWKETSAYQNDVQYRVIRMLKEHIKSLDNRTGDNVEG

SEQ ID NO: 558 - protein, 277 aa, Alicyclobacillus herbarius
MLKQAVLGNGPLINWEKNVKRGKGMATKSIKVKLRLGKHPDIRAGIWQLHKAANAGVRYYTEWLSLMRQKNLYTRGPKGEQQLYRSGEQCRRELLQRLRERQRLNGRTDEPGTDEELLKVARQIYEVLVPQSIGKSGDAQQLASNFLSPLVDPNSKGGQGQSNAGRKPAWQKMRDEGNPGWVAAKERYEQRKATDPTKKMIEMLDGLGLKPLFSVFTETYTTGVKWKDLSKRQGVRTWDRDMFQSLSERSGVIDVGSHTVHHIDLATASDAQIQYEL

SEQ ID NO: 559 - protein, 277 aa, Alicyclobacillus contaminans
MSVKSIKFKLMIGGPQYTRIRRGIYKTHEVFNEGVRYYQEWLLLMRQGDVYRYQDDKPEIVLSAEHCKRELLRRLRQVQKENVGRTSHTDEELLQVMRALYELIVPSAVGKKGDAASLSRKFLSPLAWKDSKGLTGESKAGNKPRWKRLQEQGLPYEEEYNRWLREKESDPAKHIPAQLASMGLKPFLKVFTESTEGIAWLPLAKDQGVRTWDRDMFQQAIEGLLSWESWNRRVREEYDALSARVYAYHAKHFADQPGWAVYWPQSQPRQKGWVKMK

SEQ ID NO: 560 - protein, 218 aa, Citrobacter freundii
MYELWSTFPASASHEQYKEALKRVQQRLRGRFGDAHFFQYLMEEKNRLIWKGNPQRIHYFVARNELTKRLEEAKQSATMTLPNARKHPLWVRFDARGGNLQDYYLTAEADKPRSRRFVTFSQLIWPSESGWMEKKDVEVELALSRQFYQQVKLLKNDKGKQKIEFKDKGSGSTFNGHLGGAKLQLERGDLEKEEKTSRTGKSAAFTLTLSLISNLCKK

SEQ ID NO: 561 - protein, 218 aa, Citrobacter freundii
LYELWSTFPASASHEQYKEALKRVQQRLRGRFGDAHFFQYLMEEKNRLIWKGNPQRIHYFVARNELTKRLEEAKQSATMTLPNARKHPLWVRFDARGGNLQDYYLTAEADKPRSRRFVTFSQLIWPSESGWMEKKDVEVELALSRQFYQQVKLLKNDKGKQKIEFKDKGSGSTFNGHLGGAKLQLERGDLEKEEKTSRTGKSAAFTLTLSLISNLCKK

SEQ ID NO: 562 - protein, 482 aa, Brevibacillus agri
MEKRDERFQLHQRVKFQIRVLAQIMRMANKQYGDRWDELDSLKQAVEQKKSPLDQTDRTFWEGIVCDLTKVLPRNEADWEQAVVQIHRKAEEYVGKAVQAWRKRFAADERKGIAGLSMWNIEELEGLRKLLISWSRRTRNPQEVNRFERGHTSHQRLLTHIQNVKEDRLKQLSHAIVMTALGYVYDERKQEWCAEYPACQVILFENLSQYRSNLDRSTKENSTLMKWAHRSIPKYVHMQAEPYGIQIGDVRAEYSSRFYAKTGTPGIRCKKVRGQDLQGRRFENLQKRLVNEQFLTEEQVKQLRPGDIVPDDSGELFMTLTDGSGSKEVVFLQADINAAHNLQKRFWQRYNELFKVSCRVIVRDEEEYLVPKTKSVQAKLGKGLFVKKSDTAWKDVYVWDSQAKLKGKTTFTEESESPEQLEDFQEIIEEAEEAKGTYRTLFRDPSGVFFPESVWYPQKDFWGEVKRKLYGKLRERFLTKAR

SEQ ID NO: 563 - protein, 584 aa, Brevibacillus agri
MAIRSIKLKLKTHTGPEAQNLRKGIWRTHRLLNEGVAYYMKMLLLFRQESTGERPKEELQEELICHIREQQQRNQADKNTQALPLDKALEALRQLYELLVPSSVGQSGDAQIISRKFLSPLVDPNSEGGKGTSKAGAKPTWQKKKEANDPTWEQDYEKWKKRREEDPTASVITTLEEYGIRPIFPLYTNTVTDIAWLPLQSNQFVRTWDRDMLQQAIERLLSWESWNKRVQEEYAKLKEKMAQLNEQLEGGQEWISLLEQYEENRERELRENMTAANDKYRITKRQMKGWNELYELWSTFPASASHEQYKEALKRVQQRLRGRFGDAHFFQYLMEEKNRLIWKGNPQRIHYFVARNELTKRLEEAKQSATMTLPNARKHPLWVRFDARGGNLQDYYLTAEADKPRSRRFVTFSQLIWPSESGWMEKKDVEVELALSRQFYQQVKLLKNDKGKQKIEFKDKGSGSTFNGHLGGAKLQLERGDLEKEEKNFEDGEIGSVYLNVVIDFEPLQEVKNGRVQAPYGQVLQLIRRPNEFPKVTTYKSEQLVEWIKASPQHSAGVESLASGFRVMSIDLGLRAAAATSIFL

SEQ ID NO: 564 - protein, 259 aa, Brevibacillus sp.
MAIRSIKLKLKTHTGPEAQNLRKGIWRTHRLLNEGVAYYMKMLLLFRQESTGERPKEELQEELICHIREQQQRNQADKNTQALPLDKALEALRQLYELLVPSSVGQSGDAQIISRKFLSPLVDPNSEGGKGTSKAGAKPTWQKKKEANDPTWEQDYEKWKKRREEDPTASVITTLEEYGIRPIFPLYTNTVTDIAWLPLQSNQFVRTWDRDMLQQAIERLLSWESWNKRVQEEYAKLKEKMAQLNEQLEGGQEWCTLSR

SEQ ID NO: 565 - protein, 658 aa, Methylobacterium nodulans
MLTKQDKQQKITYCTNMNEVFEAKLGSADLLLNWDHLRGRIRDRVDAGDIGSAFLKLALDVAHVLPDGVDDQLARAAFHFQSAKGAKSKHADSVQAGLRVLSIDLGVRSFATCSVFELKDTAPTTGVAFPLAEFRLWAVHERSFTLELPGENVGAAGQQWRAQADAELRQLRGGLNRHRQLLRAATVQKGERDAYLTDLREAWSAKELWPFEASLLSELERCSTVADPLWQDTCKRAARLYRTEFGAVVSEWRSRTRSREDRKYAGKSMWSVQHLTDVRRFLQSWSLAGRASGDIRRLDRERGGVFAKDLLDHIDALKDDRLKTGADLIVQAARGFQRNEFGYWVQKHAPCHVILFEDLSRYRMRTDRPRRENSQLMQWAHRGVPDMVGMQGEIYGIQDRRDPDSARKHARQPLAAFCLDTPAAFSSRYHASTMTPGIRCHPLRKREFEDQGFLELLKRENEGLDLNGYKPGDLVPLPGGEVFVCLNANGLSRIHADINAAQNLQRRFWTQHGDAFRLPCGKSAVQGQIRWAPLSMGKRQAGALGGFGYLEPTGHDSGSCQWRKTTEAEWRRLSGAQKDRDEAAAAEDEELQGLEEELLERSGERVVFFRDPSGVVLPTDLWFPSAAFWSIVRAKTVGRLRSHLDAQAEASYAVAAGL

SEQ ID NO: 566 - protein, 464 aa, Methylobacterium nodulans
MPVRSLKLKIVVPRHPSELEKAQALWSTHRLVNEAVSFYEQKLLLLRGETYSTSDGSVPQDEVRRQLLEQAREAQARNGGSGGSDDEIVRLCRSLYEAIVLADDANAQLANAFLGPLTDPNSAGFLEAFNKVDRPAPSWLDQVPASDPIDPAVLAEANAWLDTDAGRAWLVDTGAPPRWRSLAAKQDPIWPREFARKLGELRKEAASGTSAIIKALKRDFGVLPLFQPSLAPRILGSRSSLTPWDRLAFRLAVGHLLSWESWCTRARDEHTARVQRLEQFSSAHLKGDLATKVSTLREYERARKEQIAQLGLPMGERDFLITVRMTRGWDDLREKWRRSGDKGQEALHAIIATEQTRKRGRFGDPDLFRWLARPENHHVWADGHADAVGVLARVNAMERLVERSRDTALMTLPDPVAHPRSAQWEAEGGSNLRNYQLEAVGGELQITLPLLKAADDGRCIDTPL

SEQ ID NO: 567 - protein, 370 aa, Methylobacterium nodulans
MYEAIVLADDANAQLANAFLGPLTDPNSAGFLEAFNKVDRPAPSWLDQVPASDPIDPAVLAEANAWLDTDAGRAWLVDTGAPPRWRSLAAKQDPIWPREFARKLGELRKEAASGTSAIIKALKRDFGVLPLFQPSLAPRILGSRSSLTPWDRLAFRLAVGHLLSWESWCTRARDEHTARVQRLEQFSSAHLKGDLATKVSTLREYERARKEQIAQLGLPMGERDFLITVRMTRGWDDLREKWRRSGDKGQEALHAIIATEQTRKRGRFGDPDLFRWLARPENHHVWADGHADAVGVLARVNAMERLVERSRDTALMTLPDPVAHPRSAQWEAEGGSNLRNYQLEAVGGELQITLPLLKAADDGRCIDTPL

SEQ ID NO: 568 - protein, 1050 aa, Unknown
  source: /note="Description of Unknown: Marine metagenome sequence"
MRSNYHGGRNARQWRKQISGLARRTKETVFTYKFPLETDAAEIDFDKAVQTYGIAEGVGHGSLIGLVCAFHLSGFRLFSKAGEAMAFRNRSRYPTDAFAEKLSAIMGIQLPTLSPEGLDLIFQSPPRSRDGIAPVWSENEVRNRLYTNWTGRGPANKPDEHLLEIAGEIAKQVFPKFGGWDDLASDPDKALAAADKYFQSQGDFPSIASLPAAIMLSPANSTVDFEGDYIAIDPAAETLLHQAVSRCAARLGRERPDLDQNKGPFVSSLQDALVSSQNNGLSWLFGVGFQHWKEKSPKELIDEYKVPADQHGAVTQVKSFVDAIPLNPLFDTTHYGEFRASVAGKVRSWVANYWKRLLDLKSLLATTEFTLPESISDPKAVSLFSGLLVDPQGLKKVADSLPARLVSAEEAIDRLMGVGIPTAADIAQVERVADEIGAFIGQVQQFNNQVKQKLENLQDADDEEFLKGLKIELPSGDKEPPAINRISGGAPDAAAEISELEEKLQRLLDARSEHFQTISEWAEENAVTLDPIAAMVELERLRLAERGATGDPEEYALRLLLQRIGRLANRVSPVSAGSIRELLKPVFMEEREFNLFFHNRLGSLYRSPYSTSRHQPFSIDVGKAKAIDWIAGLDQISSDIEKALSGAGEALGDQLRDWINLAGFAISQRLRGLPDTVPNALAQVRCPDDVRIPPLLAMLLEEDDIARDVCLKAFNLYVSAINGCLFGALREGFIVRTRFQRIGTDQIHYVPKDKAWEYPDRLNTAKGPINAAVSSDWIEKDGAVIKPVETVRNLSSTGFAGAGVSEYLVQAPHDWYTPLDLRDVAHLVTGLPVEKNITKLKRLTNRTAFRMVGASSFKTHLDSVLLSDKIKLGDFTIIIDQHYRQSVTYGGKVKISYEPERLQVEAAVPVVDTRDRTVPEPDTLFDHIVAIDLGERSVGFAVFDIKSCLRTGEVKPIHDNNGNPVVGTVAVPSIRRLMKAVRSHRRRRQPNQKVNQTYSTALQNYRENVIGDVCNRIDTLMERYNAFPVLEFQIKNFQAGAKQLEIVYGS

SEQ ID NO: 569 - protein, 1222 aa, Unknown
  source: /note="Description of Unknown: Gut metagenome sequence"
MKKFELKQNFRNNYSGKTLRNFRQTLAQIANKKSSDSILTIKFKLDCSKTGKLPKYENLISLYDTIEDIKKGTLSYYLFTLIVSGFKFFGSASQAKAFSTKDIFKDNDFYNQFKIQSHLDLPDFVPSKIYQRLKKNVRSTNGKDNAFKASVIVAEYRKEIGKLKNKDESSEHQCEELFKKIGTALETRFSSWQDLINNCSTGCEIIDEILNDSFGTLPSIKKMVLASTTQSSDGEQDGIAIAYDPDSTFIKSDELLNPYFAVATILKSMPPEIQQDKKSAYVKANLTTPTHNALSWIFGKGLTLFQTESTEKLCAMFNVSDKRVIEQVQDAAKAVKLPAELDLNHCTLKFQDFRSSLGGHLDSWTTNYLKRLDELNDLLLNLPKNLSLPDIFMIDGKDFIEYSGCNRDEIQQMIDFVVNEQNRIKLQESLNALLGKGNNQICSDDISTVKDFSEIVNSLHSFVQQIDNSLEQSSNEANSIFSELKKKIEKNEKWDIWKNNLKKIPKLNKLSGGVPDAWKEIREIEQKFHEISENQKKHFTEVMEWIDAGNGTIDIFESRFKYDELLKKSKKNNLQSADELAFRSVLNKLGRFARQGNDLVCEKIKNWFKEQNIFDSSKDFNRYFINQKGFIFKHPSSKKDNSPYNLSANLLEKRYEVTNTVGALLEQCESDPAIVNDPFSMRSLVEFRALWFSINISGISKEQHIPTKIAQPKLDDSTYQESVSPTLKYRLEKEQITSSELNSIFTVYKSLLSGLSIRLSRNSFYLRTKFSWIGNNSLIYCPKETTWKIPAAYFKSDLWNEYKDKQILIVNEEYDVDVVKTFESVYKIVKSKDNNEKNRILPLLKQLPHDWMFKLPFGASNAEKCKVLKLEKNNKKFKPLSVSKDSLARLSGPSTYFNQIDEIMMNDESELSEMTLLADEPVRQQMSNGKIEIIPDDYVMSLAIPITRSLKKGNTESFPFKNIVSIDQGEAGFAYAVFKLSDCGNERAEPIATGLIPIPSIRRLIHSVKKYRGKKQRIQNFNQKFDSTMFTLRENVTGDICGLIVALMKKYNAFPILEKQVGNLESGSKQLMLVYKAVNSKFLAAKVDMQNDQRRSWWYQGNSWNTPILRISNPNQSNNKNIVKNINGKKYEELKIYPGYSVSAYMTSCICHVCGRNALELLKNDDSTGKVKKYQINQDGEVTIGGEVIKLYRKPDRLTPVKNLAKKGNRERTYASINERAP

SEQ ID NO: 570 - protein, 1255 aa, Unknown
  source: /note="Description of Unknown: Marine metagenome sequence"
MRSNYHGGRNARQWRKQISGLARRTKETVFTYKFPLETDAAEIDFDKAVQTYGIAEGVGHGSLIGLVCAFHLSGFRLFSKAGEAMAFRNRSRYPTDAFAEKLSAIMGIQLPTLSPEGLDLIFQSPPRSRDGIAPVWSENEVRNRLYTNWTGRGPANKPDEHLLEIAGEIAKQVFPKFGGWDDLASDPDKALAAADKYFQSQGDFPSIASLPAAIMLSPANSTVDFEGDYIAIDPAAETLLHQAVSRCAARLGRERPDLDQNKGPFVSSLQDALVSSQNNGLSWLFGVGFQHWKEKSPKELIDEYKVPADQHGAVTQVKSFVDAIPLNPLFDTTHYGEFRASVAGKVRSWVANYWKRLLDLKSLLATTEFTLPESISDPKAVSLFSGLLVDPQGLKKVADSLPARLVSAEEAIDRLMGVGIPTAADIAQVERVADEIGAFIGQVQQFNNQVKQKLENLQDADDEEFLKGLKIELPSGDKEPPAINRISGGAPDAAAEISELEEKLQRLLDARSEHFQTISEWAEENAVTLDPIAAMVELERLRLAERGATGDPEEYALRLLLQRIGRLANRVSPVSAGSIRELLKPVFMEEREFNLFFHNRLGSLYRSPYSTSRHQPFSIDVGKAKAIDWIAGLDQISSDIEKALSGAGEALGDQLRDWINLAGFAISQRLRGLPDTVPNALAQVRCPDDVRIPPLLAMLLEEDDIARDVCLKAFNLYVSAINGCLFGALREGFIVRTRFQRIGTDQIHYVPKDKAWEYPDRLNTAKGPINAAVSSDWIEKDGAVIKPVETVRNLSSTGFAGAGVSEYLVQAPHDWYTPLDLRDVAHLVTGLPVEKNITKLKRLTNRTAFRMVGASSFKTHLDSVLLSDKIKLGDFTIIIDQHYRQSVTYGGKVKISYEPERLQVEAAVPVVDTRDRTVPEPDTLFDHIVAIDLGERSVGFAVFDIKSCLRTGEVKPIHDNNGNPVVGTVAVPSIRRLMKAVRSHRRRRQPNQKVNQTYSTALQNYRENVIGDVCNRIDTLMERYNAFPVLEFQIKNFQAGAKQLEIVYGSVLHRYTFSGVDAHKAKRREYWYNGELWEHPYLMAKKWNEETNSMSGAPKPVSLFPGVTVNAARTSQICHQCQRNPMSHLRGLTGTIEISSDGLLELDDGTIRLFETSDYDEDKFKQSRREKRRLDANVLLSGRHRAEYIYTVAKRNLRRPPKNVMTKDTTQSRYTCLYKNCSWTGHADENAAINIGRRYLAERIDMPASKTKAAV

SEQ ID NO: 571 - protein, 1258 aa, Unknown
  source: /note="Description of Unknown: Metagenome sequence"
MNARDWRKHVGVLAQQHKETTRTYTFPLDTTGSAIDFDAALQAYNAVEGVGYGSLLGLACAVHLSGFRLFSTGKEAATFRNRARYPNAAFQAALRKELGTTITTLTPETLDRLFSSRPKRRNGVPLPWNQDSIRDRLYTNWVKPRPGDTPDAVLFQIATGIAQEITEDVSSWTDLAKNSDRGLKAAHRYFARVGGFPAFDNLTPPATVQPTDTTIDYDPNAPFHLVSHADQTLIHQSISLCAHRIRQEDPALDPNKSGFIKQLQNNFLSQTFYGLSWLFGAGYVHFRECTANDLAIQYGIPNNCRDGIHQIKSFADAILPNTFFEKKHYRKDSRSVGKKAKSWISNYWQRLLQLQTWVDDHTWVTLPQELTEAQFKPLFRGLLVDAVELMAIAERLPQRLADCRDSLDCLMGKGPQAATKNDVEIVEKVREEIESFVGQIEQLGNQLRHQLENENNDQVHRDNLHQLKNRLPLDLRRPQALNKISGGVPDVAKSIRGLETQLDQVLKERRSHFGRLTKWAKECGITLDPLQPLIESEKQRVAERGSAHDAKELAIRLLLQRIGRLGHRLSPTNATAIQELLRPVFAVKREFNLFFHNHMGALYRSPYSTSRHQPFQINVDVAHGTDWIGTIETLIQNLFTQIQDDALLRDLVQLEGFVFSHKLRALPGVIPSELARPNNLQQMGLPALLLVLLQADQVHRETVLRVFNLYGSAINGYLFQALRPGFIVRAGFQRLETKKLRYVPKAQSWQYPDRLHHAKSAIKNSLSAGWIKKNHQGAILPQKTLTALVKQKSLKDTGVPEYLVQAPHDWYVPIDLRGPAIPIEGLTVGTEGPELTQLGPMKDDCAFRAIGPSSFKSKIDAGLLPQDVKYGDMTLIFDQHYQQSISFANGTFSIQYQPTSLQVKAAIPVVDKRPRDTRNNSHLYDRIVAIDLGERKIGYAIFDLKQVLKSEQLEPMREDGKPLIGSISIRSIRGLMKAVQTHRNRRQPNYRIDQTYSKALMHYRESVIGDVCNAIDTLCARYGGFPVLESSVRNFEVGSAQLKTVYGSVSRRYTWSAVDAHKNQRQQYWLGGTKDKIPIWTHPYLMTREWDEKNSKWSNRSKPLKMHPGVEVHPAGTSQICHQCKRNPIGALWNVADTVVLDDQGQLDLDDGTIRLNSGYIDTTEIKRARRKKIRLPENKPLTGSHKTSHVRAVARRNLRQPPKSTRAKDTTQSRYTCLYVDCGHECHADENAAINIGRKYLQERIHIEASRQALSTR

SEQ ID NO: 572 - protein, 1269 aa, Unknown
  source: /note="Description of Unknown: Marine metagenome sequence"
MVAGLKKIKRDGVTMKSNYHGGVKARAWRKRIGGLARRQKETVFTYKFPLETEEAGIDFDKAVQTYGIAEGISQGSLIGLVCAFHLSGFRLFSKADETKAFCNQGRYPNQAFAEKLRNELSVTLPKLSPQSLDVLFQSSPKSKNGVAPEWSKNAIRNRLYTNWTGKGAGTNPDEHLLEIAEDIAAEIDSDLDGWKDLEEHPEKGLSAADRYFQAQGDFPSLTGLPPSVPLTPQNSTVAFEGDPVCLNPSDNTLLHQAVARCAGRILQEQPNLSPDKNRFINQLQDELVSSQNNGLSWLFGVGFKYWKEMSVDQLADDYKVKSTDLDALKQVKSFIDAIPLNPLFDTPHYGEFRASVAGKMRSWVKNYWKRLLDLKSQLGTANINLPEGLDEQRAENLFSGLLIDSKGLRQVTDKLPSRLKKAEDTIDRLMGDGNPTSDDIEQVETVAAEISAFIGQVEQFNNQLEQRLENPLEGDDETFLKQLKIDLPAEFKKPPAINRISGGSPDPTAEIAELEEKLDRLMSARKEHYETIAEWASANKVTLDPMEAMTTLEAQRLTERGAEGDQEEFALRLLLQRIGRLANRLSPQGATAIRDLLRPVFTEKREFNLFFHNRMGSLYRSPYSTSRHQPFTIDVAVAKNTDWMDALDGIAETIMKGLSQAGDELSLRLRDWINISGFSLSQRLRGLPDTVPGELALVRSADDVRIPPMLALQLEEDEVSREVCLKAFNLYVSAINGCLFRALREGFIVRTKFQRLERDVLSYVPKTKLWNYPQRLDTARGPIHSALAAAWINKEGSVIDPVETVTALSDTGFSDDGIPEYLVQAPHDWYTPIDLRDISKPVSGLPVKKNITGLKRQKKQTAFRMVGPSSFKSHLDSTLLSEEVKLGDFTLIFDQYYKQRVSYNGRVKITFEPDRLHVEAAVPVIDKRVRPSTEEDALFDHLLAIDLGEKRVGYAVYDIKACLRTGDIKPLEDGDGKPIVGSVAVPSIRRLMKAVRSHRQQRQPNQKVNQTYSTALMNYRENVIGDVCNRIDTLMEKYNAFPVLESSVMNFEAGSRQLEMVYGSVLHRYTYSKIDAHTAKRKEYWYTGEYWDHPYLMAHKWNERTRSYSGSLSALTLYPGVMVHPAGTSQRCHQCKRNPMVEIKQLTGQVEINADGSLELDDGTICLYEGYDYSPEEYKKAKREKRRLDPNVPLSGRHQAKHVSAVAKRNLRRPTVSMMSGDTTQARYVCLYTDCDFTGHADENAAINIGWKYLTERIALSESKDKAGV

SEQ ID NO: 573 - protein, 1285 aa, Rhodobacter capsulatus
MQIGKVQGRTISEFGDPAGGLKRKISTDGKNRKELPAHLSSDPKALIGQWISGIDKIYRKPDSRKSDGKAIHSPTPSKMQFDARDDLGEAFWKLVSEAGLAQDSDYDQFKRRLHPYGDKFQPADSGAKLKFEADPPEPQAFHGRWYGAMSKRGNDAKELAAALYEHLHVDEKRIDGQPKRNPKTDKFAPGLVVARALGIESSVLPRGMARLARNWGEEEIQTYFVVDVAASVKEVAKAAVSAAQAFDPPRQVSGRSLSPKVGFALAEHLERVTGSKRCSFDPAAGPSVLALHDEVKKTYKRLCARGKNAARAFPADKTELLALMRHTHENRVRNQMVRMGRVSEYRGQQAGDLAQSHYWTSAGQTEIKESEIFVRLWVGAFALAGRSMKAWIDPMGKIVNTEKNDRDLTAAVNIRQVISNKEMVAEAMARRGIYFGETPELDRLGAEGNEGFVFALLRYLRGCRNQTFHLGARAGFLKEIRKELEKTRWGKAKEAEHVVLTDKTVAAIRAIIDNDAKALGARLLADLSGAFVAHYASKEHFSTLYSEIVKAVKDAPEVSSGLPRLKLLLKRADGVRGYVHGLRDTRKHAFATKLPPPPAPRELDDPATKARYIALLRLYDGPFRAYASGITGTALAGPAARAKEAATALAQSVNVTKAYSDVMEGRSSRLRPPNDGETLREYLSALTGETATEFRVQIGYESDSENARKQAEFIENYRRDMLAFMFEDYIRAKGFDWILKIEPGATAMTRAPVLPEPIDTRGQYEHWQAALYLVMHFVPASDVSNLLHQLRKWEALQGKYELVQDGDATDQADARREALDLVKRFRDVLVLFLKTGEARFEGRAAPFDLKPFRALFANPATFDRLFMATPTTARPAEDDPEGDGASEPELRVARTLRGLRQIARYNHMAVLSDLFAKHKVRDEEVARLAEIEDETQEKSQIVAAQELRTDLHDKVMKCHPKTISPEERQSYAAAIKTIEEHRFLVGRVYLGDHLRLHRLMMDVIGRLIDYAGAYERDTGTFLINASKQLGAGADWAVTIAGAANTDARTQTRKDLAHFNVLDRADGTPDLTALVNRAREMMAYDRKRKNAVPRSILDMLARLGLTLKWQMKDHLLQDATITQAAIKHLDKVRLTVGGPAAVTEARFSQDYLQMVAAVFNGSVQNPKPRRRDDGDAWHKPPKPATAQSQPDQKPPNKAPSAGSRLPPPQVGEVYEGVVVKVIDTGSLGFLAVEGVAGNIGLHISRLRRIREDAIIVGRRYRFRVEIYVPPKSNTSKLNAADLVRID

SEQ ID NO: 574 - protein, 1340 aa, Unknown
  source: /note="Description of Unknown: Lachnospiraceae bacterium sequence"
MQISKVNHKHVAVGQKDRERITGFIYNDPVGDEKSLEDVVAKRANDTKVLFNVFNTKDLYDSQESDKSEKDKEIISKGAKFVAKSFNSAITILKKQNKIYSTLTSQQVIKELKDKFGGARIYDDDIEEALTETLKKSFRKENVRNSIKVLIENAAGIRSSLSKDEEELIQEYFVKQLVEEYTKTKLQKNVVKSIKNQNMVIQPDSDSQVLSLSESRREKQSSAVSSDTLVNCKEKDVLKAFLTDYAVLDEDERNSLLWKLRNLVNLYFYGSESIRDYSYTKEKSVWKEHDEQKANKTLFIDEICHITKIGKNGKEQKVLDYEENRSRCRKQNINYYRSALNYAKNNTSGIFENEDSNHFWIHLIENEVERLYNGIENGEEFKFETGYISEKVWKAVINHLSIKYIALGKAVYNYAMKELSSPGDIEPGKIDDSYINGITSFDYEIIKAEESLQRDISMNVVFATNYLACATVDTDKDFLLFSKEDIRSCTKKDGNLCKNIMQFWGGYSTWKNFCEEYLKDDKDALELLYSLKSMLYSMRNSSFHFSTENVDNGSWDTELIGKLFEEDCNRAARIEKEKFYNNNLHMFYSSSLLEKVLERLYSSHHERASQVPSFNRVFVRKNFPSSLSEQRITPKFTDSKDEQIWQSAVYYLCKEIYYNDFLQSKEAYKLFREGVKNLDKNDINNQKAADSFKQAVVYYGKAIGNATLSQVCQAIMTEYNRQNNDGLKKKSAYAEKQNSNKYKHYPLFLKQVLQSAFWEYLDENKEIYGFISAQIHKSNVEIKAEDFIANYSSQQYKKLVDKVKKTPELQKWYTLGRLINPRQANQFLGSIRNYVQFVKDIQRRAKENGNPIRNYYEVLESDSIIKILEMCTKLNGTTSNDIHDYFRDEDEYAEYISQFVNFGDVHSGAALNAFCNSESEGKKNGIYYDGINPIVNRNWVLCKLYGSPDLISKIISRVNENMIHDFHKQEDLIREYQIKGICSNKKEQQDLRTFQVLKNRVELRDIVEYSEIINELYGQLIKWCYLRERDLMYFQLGFHYLCLNNASSKEADYIKINVDDRNISGAILYQIAAMYINGLPVYYKKDDMYVALKSGKKASDELNSNEQTSKKINYFLKYGNNILGDKKDQLYLAGLELFENVAEHENIIIFRNEIDHFHYFYDRDRSMLDLYSEVFDRFFTYDMKLRKNVVNMLYNILLDHNIVSSFVFETGEKKVGRGDSEVIKPSAKIRLRANNGVSSDVFTYKVGSKDELKIATLPAKNEEFLLNVARLIYYPDMEAVSENMVREGVVKVEKSNDKKGKISRGSNTRSSNQSKYNNKSKNRMNYSMGSIFEKMDLKFD

SEQ ID NO: 575 - protein, 1437 aa, Unknown
  source: /note="Description of Unknown: Lachnospiraceae bacterium sequence"
MKISKVREENRGAKLTVNAKTAVVSENRSQEGILYNDPSRYGKSRKNDEDRDRYIESRLKSSGKLYRIFNEDKNKRETDELQWFLSEIVKKINRRNGLVLSDMLSVDDRAFEKAFEKYAELSYTNRRNKVSGSPAFETCGVDAATAERLKGIISETNFINRIKNNIDNKVSEDIIDRIIAKYLKKSLCRERVKRGLKKLLMNAFDLPYSDPDIDVQRDFIDYVLEDFYHVRAKSQVSRSIKNMNMPVQPEGDGKFAITVSKGGTESGNKRSAEKEAFKKFLSDYASLDERVRDDMLRRMRRLVVLYFYGSDDSKLSDVNEKFDVWEDHAARRVDNREFIKLPLENKLANGKTDKDAERIRKNTVKELYRNQNIGCYRQAVKAVEEDNNGRYFDDKMLNMFFIHRIEYGVEKIYANLKQVTEFKARTGYLSEKIWKDLINYISIKYIAMGKAVYNYAMDELNASDKKEIELGKISEEYLSGISSFDYELIKAEEMLQRETAVYVAFAARHLSSQTVELDSENSDFLLLKPKGTMDKNDKNKLASNNILNFLKDKETLRDTILQYFGGHSLWTDFPFDKYLAGGKDDVDFLTDLKDVIYSMRNDSFHYATENHNNGKWNKELISAMFEHETERMTVVMKDKFYSNNLPMFYKNDDLKKLLIDLYKDNVERASQVPSFNKVFVRKNFPALVRDKDNLGIELDLKADADKGENELKFYNALYYMFKEIYYNAFLNDKNVRERFITKATKVADNYDRNKERNLKDRIKSAGSDEKKKLREQLQNYIAENDFGQRIKNIVQVNPDYTLAQICQLIMTEYNQQNNGCMQKKSAARKDINKDSYQHYKMLLLVNLRKAFLEFIKENYAFVLKPYKHDLCDKADFVPDFAKYVKPYAGLISRVAGSSELQKWYIVSRFLSPAQANHMLGFLHSYKQYVWDIYRRASETGTEINHSIAEDKIAGVDITDVDAVIDLSVKLCGTISSEISDYFKDDEVYAEYISSYLDFEYDGGNYKDSLNRFCNSDAVNDQKVALYYDGEHPKLNRNIILSKLYGERRFLEKITDRVSRSDIVEYYKLKKETSQYQTKGIFDSEDEQKNIKKFQEMKNIVEFRDLMDYSEIADELQGQLINWIYLRERDLMNFQLGYHYACLNNDSNKQATYVTLDYQGKKNRKINGAILYQICAMYINGLPLYYVDKDSSEWTVSDGKESTGAKIGEFYRYAKSFENTSDCYASGLEIFENISEHDNITELRNYIEHFRYYSSFDRSFLGIYSEVFDRFFTYDLKYRKNVPTILYNILLQHFVNVRFEFVSGKKMIGIDKKDRKIAKEKECARITIREKNGVYSEQFTYKLKNGTVYVDARDKRYLQSIIRLLFYPEKVNMDEMIEVKEKKKPSDNNTGKGYSKRDRQQDRKEYDKYKEKKKKEGNFLSGMGGNINWDEINAQLKN

SEQ ID NO: 576 - protein, 1385 aa, Clostridium aminophilum
MKFSKVDHTRSAVGIQKATDSVHGMLYTDPKKQEVNDLDKRFDQLNVKAKRLYNVFNQSKAEEDDDEKRFGKVVKKLNRELKDLLFHREVSRYNSIGNAKYNYYGIKSNPEEIVSNLGMVESLKGERDPQKVISKLLLYYLRKGLKPGTDGLRMILEASCGLRKLSGDEKELKVFLQTLDEDFEKKTFKKNLIRSIENQNMAVQPSNEGDPIIGITQGRFNSQKNEEKSAIERMMSMYADLNEDHREDVLRKLRRLNVLYFNVDTEKTEEPTLPGEVDTNPVFEVWHDHEKGKENDRQFATFAKILTEDRETRKKEKLAVKEALNDLKSAIRDHNIMAYRCSIKVTEQDKDGLFFEDQRINRFWIHHIESAVERILASINPEKLYKLRIGYLGEKVWKDLLNYLSIKYIAVGKAVFHFAMEDLGKTGQDIELGKLSNSVSGGLTSFDYEQIRADETLQRQLSVEVAFAANNLFRAVVGQTGKKIEQSKSEENEEDFLLWKAEKIAESIKKEGEGNTLKSILQFFGGASSWDLNHFCAAYGNESSALGYETKFADDLRKAIYSLRNETFHFTTLNKGSFDWNAKLIGDMFSHEAATGIAVERTRFYSNNLPMFYRESDLKRIMDHLYNTYHPRASQVPSFNSVFVRKNFRLFLSNTLNTNTSFDTEVYQKWESGVYYLFKEIYYNSFLPSGDAHHLFFEGLRRIRKEADNLPIVGKEAKKRNAVQDFGRRCDELKNLSLSAICQMIMTEYNEQNNGNRKVKSTREDKRKPDIFQHYKMLLLRTLQEAFAIYIRREEFKFIFDLPKTLYVMKPVEEFLPNWKSGMFDSLVERVKQSPDLQRWYVLCKFLNGRLLNQLSGVIRSYIQFAGDIQRRAKANHNRLYMDNTQRVEYYSNVLEVVDFCIKGTSRFSNVFSDYFRDEDAYADYLDNYLQFKDEKIAEVSSFAALKTFCNEEEVKAGIYMDGENPVMQRNIVMAKLFGPDEVLKNVVPKVTREEIEEYYQLEKQIAPYRQNGYCKSEEDQKKLLRFQRIKNRVEFQTITEFSEIINELLGQLISWSFLRERDLLYFQLGFHYLCLHNDTEKPAEYKEISREDGTVIRNAILHQVAAMYVGGLPVYTLADKKLAAFEKGEADCKLSISKDTAGAGKKIKDFFRYSKYVLIKDRMLTDQNQKYTIYLAGLELFENTDEHDNITDVRKYVDHFKYYATSDENAMSILDLYSEIHDRFFTYDMKYQKNVANMLENILLRHFVLIRPEFFTGSKKVGEGKKITCKARAQIEIAENGMRSEDFTYKLSDGKKNISTCMIAARDQKYLNTVARLLYYPHEAKKSIVDTREKKNNKKTNRGDGTFNKQKGTARKEKDNGPREFNDTGFSNTPFAGFDPFRNS

SEQ ID NO: 577 - protein, 1334 aa, Unknown; identical to SEQ ID NO: 38
  source: /note="Description of Unknown: Lachnospiraceae bacterium sequence"

SEQ ID NO: 578 - protein, 1175 aa, Carnobacterium gallinarum
MRITKVKIKLDNKLYQVTMQKEEKYGTLKLNEESRKSTAEILRLKKASFNKSFHSKTINSQKENKNATIKKNGDYISQIFEKLVGVDTNKNIRKPKMSLTDLKDLPKKDLALFIKRKFKNDDIVEIKNLDLISLFYNALQKVPGEHFTDESWADFCQEMMPYREYKNKFIERKIILLANSIEQNKGFSINPETFSKRKRVLHQWAIEVQERGDFSILDEKLSKLAEIYNFKKMCKRVQDELNDLEKSMKKGKNPEKEKEAYKKQKNFKIKTIWKDYPYKTHIGLIEKIKENEELNQFNIEIGKYFEHYFPIKKERCTEDEPYYLNSETIATTVNYQLKNALISYLMQIGKYKQFGLENQVLDSKKLQEIGIYEGFQTKFMDACVFATSSLKNIIEPMRSGDILGKREFKEAIATSSFVNYHHFFPYFPFELKGMKDRESELIPFGEQTEAKQMQNIWALRGSVQQIRNEIFHSFDKNQKFNLPQLDKSNFEFDASENSTGKSQSYIETDYKFLFEAEKNQLEQFFIERIKSSGALEYYPLKSLEKLFAKKEMKFSLGSQVVAFAPSYKKLVKKGHSYQTATEGTANYLGLSYYNRYELKEESFQAQYYLLKLIYQYVFLPNFSQGNSPAFRETVKAILRINKDEARKKMKKNKKFLRKYAFEQVREMEFKETPDQYMSYLQSEMREEKVRKAEKNDKGFEKNITMNFEKLLMQIFVKGFDVFLTTFAGKELLLSSEEKVIKETEISLSKKINEREKTLKASIQVEHQLVATNSAISYWLFCKLLDSRHLNELRNEMIKFKQSRIKFNHTQHAELIQNLLPIVELTILSNDYDEKNDSQNVDVSAYFEDKSLYETAPYVQTDDRTRVSFRPILKLEKYHTKSLIEALLKDNPQFRVAATDIQEWMHKREEIGELVEKRKNLHTEWAEGQQTLGAEKREEYRDYCKKIDRFNWKANKVTLTYLSQLHYLITDLLGRMVGFSALFERDLVYFSRSFSELGGETYHISDYKNLSGVLRLNAEVKPIKIKNIKVIDNEENPYKGNEPEVKPFLDRLHAYLENVIGIKAVHGKIRNQTAHLSVLQLELSMIESMNNLRDLMAYDRKLKNAVTKSMIKILDKHGMILKLKIDENHKNFEIESLIPKEIIHLKDKAIKTNQVSEEYCQLVLALLTTNPGNQLN

SEQ ID NO: 579 - protein, 1164 aa, Carnobacterium gallinarum
MRMTKVKINGSPVSMNRSKLNGHLVWNGTTNTVNILTKKEQSFAASFLNKTLVKADQVKGYKVLAENIFIIFEQLEKSNSEKPSVYLNNIRRLKEAGLKRFFKSKYHEEIKYTSEKNQSVPTKLNLIPLFFNAVDRIQEDKFDEKNWSYFCKEMSPYLDYKKSYLNRKKEILANSIQQNRGFSMPTAEEPNLLSKRKQLFQQWAMKFQESPLIQQNNFAVEQFNKEFANKINELAAVYNVDELCTAITEKLMNFDKDKSNKTRNFEIKKLWKQHPHNKDKALIKLFNQEGNEALNQFNIELGKYFEHYFPKTGKKESAESYYLNPQTIIKTVGYQLRNAFVQYLLQVGKLHQYNKGVLDSQTLQEIGMYEGFQTKFMDACVFASSSLRNIIQATTNEDILTREKFKKELEKNVELKHDLFFKTEIVEERDENPAKKIAMTPNELDLWAIRGAVQRVRNQIFHQQINKRHEPNQLKVGSFENGDLGNVSYQKTIYQKLFDAEIKDIEIYFAEKIKSSGALEQYSMKDLEKLFSNKELTLSLGGQVVAFAPSYKKLYKQGYFYQNEKTIELEQFTDYDFSNDVFKANYYLIKLIYHYVFLPQFSQANNKLFKDTVHYVIQQNKELNTTEKDKKNNKKIRKYAFEQVKLMKNESPEKYMQYLQREMQEERTIKEAKKTNEEKPNYNFEKLLIQIFIKGFDTFLRNFDLNLNPAEELVGTVKEKAEGLRKRKERIAKILNVDEQIKTGDEEIAFWIFAKLLDARHLSELRNEMIKFKQSSVKKGLIKNGDLIEQMQPILELCILSNDSESMEKESFDKIEVFLEKVELAKNEPYMQEDKLTPVKFRFMKQLEKYQTRNFIENLVIENPEFKVSEKIVLNWHEEKEKIADLVDKRTKLHEEWASKAREIEEYNEKIKKNKSKKLDKPAEFAKFAEYKIICEAIENFNRLDHKVRLTYLKNLHYLMIDLMGRMVGFSVLFERDFVYMGRSYSALKKQSIYLNDYDTFANIRDWEVNENKHLFGTSSSDLTFQETAEFKNLKKPMENQLKALLGVTNHSFEIRNNIAHLHVLRNDGKGEGVSLLSCMNDLRKLMSYDRKLKNAVTKAIIKILDKHGMILKLTNNDHTKPFEIESLKPKKIIHLEKSNHSFPMDQVSQEYCDLVKKMLVFTN

SEQ ID NO: 580 - protein, 1154 aa, Paludibacter propionicigenes
MRVSKVKVKDGGKDKMVLVHRKTTGAQLVYSGQPVSNETSNILPEKKRQSFDLSTLNKTIIKFDTAKKQKLNVDQYKIVEKIFKYPKQELPKQIKAEEILPFLNHKFQEPVKYWKNGKEESFNLTLLIVEAVQAQDKRKLQPYYDWKTWYIQTKSDLLKKSIENNRIDLTENLSKRKKALLAWETEFTASGSIDLTHYHKVYMTDVLCKMLQDVKPLTDDKGKINTNAYHRGLKKALQNHQPAIFGTREVPNEANRADNQLSIYHLEVVKYLEHYFPIKTSKRRNTADDIAHYLKAQTLKTTIEKQLVNAIRANIIQQGKTNHHELKADTTSNDLIRIKTNEAFVLNLTGTCAFAANNIRNMVDNEQTNDILGKGDFIKSLLKDNTNSQLYSFFFGEGLSTNKAEKETQLWGIRGAVQQIRNNVNHYKKDALKTVFNISNFENPTITDPKQQTNYADTIYKARFINELEKIPEAFAQQLKTGGAVSYYTIENLKSLLTTFQFSLCRSTIPFAPGFKKVFNGGINYQNAKQDESFYELMLEQYLRKENFAEESYNARYFMLKLIYNNLFLPGFTTDRKAFADSVGFVQMQNKKQAEKVNPRKKEAYAFEAVRPMTAADSIADYMAYVQSELMQEQNKKEEKVAEETRINFEKFVLQVFIKGFDSFLRAKEFDFVQMPQPQLTATASNQQKADKLNQLEASITADCKLTPQYAKADDATHIAFYVFCKLLDAAHLSNLRNELIKFRESVNEFKFHHLLEIIEICLLSADVVPTDYRDLYSSEADCLARLRPFIEQGADITNWSDLFVQSDKHSPVIHANIELSVKYGTTKLLEQIINKDTQFKTTEANFTAWNTAQKSIEQLIKQREDHHEQWVKAKNADDKEKQERKREKSNFAQKFIEKHGDDYLDICDYINTYNWLDNKMHFVHLNRLHGLTIELLGRMAGFVALFDRDFQFFDEQQIADEFKLHGFVNLHSIDKKLNEVPTKKIKEIYDIRNKIIQINGNKINESVRANLIQFISSKRNYYNNAFLHVSNDEIKEKQMYDIRNHIAHFNYLTKDAADFSLIDLINELRELLHYDRKLKNAVSKAFIDLFDKHGMILKLKLNADHKLKVESLEPKKIYHLGSSAKDKPEYQYCTNQVMMAYCNMCRSLLEMKK

SEQ ID NO: 581 - protein, 1120 aa, Listeria seeligeri; identical to SEQ ID NO: 41

SEQ ID NO: 582 - protein, 970 aa, Listeria weihenstephanensis
MLALLHQEVPSQKLHNLKSLNTESLTKLFKPKFQNMISYPPSKGAEHVQFCLTDIAVPAIRDLDEIKPDWGIFFEKLKPYTDWAESYIHYKQTTIQKSIEQNKIQSPDSPRKLVLQKYVTAFLNGEPLGLDLVAKKYKLADLAESFKVVDLNEDKSANYKIKACLQQHQRNILDELKEDPELNQYGIEVKKYIQRYFPIKRAPNRSKHARADFLKKELIESTVEQQFKNAVYHYVLEQGKMEAYELTDPKTKDLQDIRSGEAFSFKFINACAFASNNLKMILNPECEKDILGKGDFKKNLPNSTTQSDVVKKMIPFFSDEIQNVNFDEAIWAIRGSIQQIRNEVYHCKKHSWKSILKIKGFEFEPNNMKYTDSDMQKLMDKDIAKIPDFIEEKLKSSGIIRFYSHDKLQSIWEMKQGFSLLTTNAPFVPSFKRVYAKGHDYQTSKNRYYDLGLTTFDILEYGEEDFRARYFLTKLVYYQQFMPWFTADNNAFRDAANFVLRLNKNRQQDAKAFINIREVEEGEMPRDYMGYVQGQIAIHEDSTEDTPNHFEKFISQVFIKGFDSHMRSADLKFIKNPRNQGLEQSEIEEMSFDIKVEPSFLKNKDDYIAFWTFCKMLDARHLSELRNEMIKYDGHLTGEQEIIGLALLGVDSRENDWKQFFSSEREYEKIMKGYVGEELYQREPYRQSDGKTPILFRGVEQARKYGTETVIQRLFDASPEFKVSKCNITEWERQKETIEETIERRKELHNEWEKNPKKPQNNAFFKEYKECCDAIDAYNWHKNKTTLVYVNELHHLLIEILGRYVGYVAIADRDFQCMANQYFKHSGITERVEYWGDNRLKSIKKLDTFLKKEGLFVSEKNARNHIAHLNYLSLKSECTLLYLSERLREIFKYDRKLKNAVSKSLIDILDRHGMSVVFANLKENKHRLVIKSLEPKKLRHLGEKKIDNGYIETNQVSEEYCGIVKRLLEI

SEQ ID NO: 583 - protein, 1051 aa, Listeria newyorkensis
MKITKMRVDGRTIVMERTSKEGQLGYEGIDGNKTTEIIFDKKKESFYKSILNKTVRKPDEKEKNRRKQAINKAINKEITELMLAVLHQEVPSQKLHNLKSLNTESLTKLFKPKFQNMISYPPSKGAEHVQFCLTDIAVPAIRDLDEIKPDWGIFFEKLKPYTDWAESYIHYKQTTIQKSIEQNKIQSPDSPRKLVLQKYVTAFLNGEPLGLDLVAKKYKLADLAESFKLVDLNEDKSANYKIKACLQQHQRNILDELKEDPELNQYGIEVKKYIQRYFPIKRAPNRSKHARADFLKKELIESTVEQQFKNAVYHYVLEQGKMEAYELTDPKTKDLQDIRSGEAFSFKFINACAFASNNLKMILNPECEKDILGKGNFKKNLPNSTTRSDVVKKMIPFFSDELQNVNFDEAIWAIRGSIQQIRNEVYHCKKHSWKSILKIKGFEFEPNNMKYADSDMQKLMDKDIAKIPEFIEEKLKSSGVVRFYRHDELQSIWEMKQGFSLLTTNAPFVPSFKRVYAKGHDYQTSKNRYYNLDLTTFDILEYGEEDFRARYFLTKLVYYQQFMPWFTADNNAFRDAANFVLRLNKNRQQDAKAFINIREVEEGEMPRDYMGYVQGQIAIHEDSIEDTPNHFEKFISQVFIKGFDRHMRSANLKFIKNPRNQGLEQSEIEEMSFDIKVEPSFLKNKDDYIAFWIFCKMLDARHLSELRNEMIKYDGHLTGEQEIIGLALLGVDSRENDWKQFFSSEREYEKIMKGYVVEELYQREPYRQSDGKTPILFRGVEQARKYGTETVIQRLFDANPEFKVSKCNLAEWERQKETIEETIKRRKELHNEWAKNPKKPQNNAFFKEYKECCDAIDAYNWHKNKTTLAYVNELHHLLIEILGRYVGYVAIADRDFQCMANQYFKHSGITERVEYWGDNRLKSIKKLDTFLKKEGLFVSEKNARNHIAHLNYLSLKSECTLLYLSERLREIFKYDRKLKNAVSKSLIDILDRHGMSVVFANLKENKHRLVIKSLEPKKLRHLGGKKIDGGYIETNQVSEEYCGIVKRLLEM

SEQ ID NO: 584 - protein, 1182 aa, Leptotrichia wadei
MYMKITKIDGVSHYKKQDKGILKKKWKDLDERKQREKIEARYNKQIESKIYKEFFRLKNKKRIEKEEDQNIKSLYFFIKELYLNEKNEEWELKNINLEILDDKERVIKGYKFKEDVYFFKEGYKEYYLRILFNNLIEKVQNENREKVRKNKEFLDLKEIFKKYKNRKIDLLLKSINNNKINLEYKKENVNEEIYGINPTNDREMTFYELLKEIIEKKDEQKSILEEKLDNFDITNFLENIEKIFNEETEINIIKGKVLNELREYIKEKEENNSDNKLKQIYNLELKKYIENNFSYKKQKSKSKNGKNDYLYLNFLKKIMFIEEVDEKKEINKEKFKNKINSNFKNLFVQHILDYGKLLYYKENDEYIKNTGQLETKDLEYIKTKETLIRKMAVLVSFAANSYYNLFGRVSGDILGTEVVKSSKTNVIKVGSHIFKEKMLNYFFDFEIFDANKIVEILESISYSIYNVRNGVGHFNKLILGKYKKKDINTNKRIEEDLNNNEEIKGYFIKKRGEIERKVKEKFLSNNLQYYYSKEKIENYFEVYEFEILKRKIPFAPNFKRIIKKGEDLFNNKNNKKYEYFKNFDKNSAEEKKEFLKTRNFLLKELYYNNFYKEFLSKKEEFEKIVLEVKEEKKSRGNINNKKSGVSFQSIDDYDTKINISDYIASIHKKEMERVEKYNEEKQKDTAKYIRDFVEEIFLTGFINYLEKDKRLHFLKEEFSILCNNNNNVVDFNININEEKIKEFLKENDSKTLNLYLFFNMIDSKRISEFRNELVKYKQFTKKRLDEEKEFLGIKIELYETLIEFVILTREKLDTKKSEEIDAWLVDKLYVKDSNEYKEYEEILKLFVDEKILSSKEAPYYATDNKTPILLSNFEKTRKYGTQSFLSEIQSNYKYSKVEKENIEDYNKKEEIEQKKKSNIEKLQDLKVELHKKWEQNKITEKEIEKYNNTTRKINEYNYLKNKEELQNVYLLHEMLSDLLARNVAFFNKWERDFKFIVIAIKQFLRENDKEKVNEFLNPPDNSKGKKVYFSVSKYKNTVENIDGIHKNFMNLIFLNNKFMNRKIDKMNCAIWVYFRNYIAHFLHLHTKNEKISLISQMNLLIKLFSYDKKVQNHILKSTKTLLEKYNIQINFEISNDKNEVFKYKIKNRLYSKKGKMLGKNNKFEILENEFLENVKAMLEYSE

SEQ ID NO: 585 - protein, 1180 aa, Leptotrichia wadei
MKITKIDGVSHYKKQDKGILKKKWKDLDERKQREKIEARYNKQIESKIYKEFFRLKNKKRIEKEEDQNIKSLYFFIKELYLNEKNEEWELKNINLEILDDKERVIKGYKFKEDVYFFKEGYKEYYLRILFNNLIEKVQNENREKVRKNKEFLDLKEIFKKYKNRKIDLLLKSINNNKINLEYKKENVNEEIYGINPTNDREMTFYELLKEIIEKKDEQKSILEEKLDNFDITNFLENIEKIFNEETEINIIKGKVLNELREYIKEKEENNSDNKLKQIYNLELKKYIENNFSYKKQKSKSKNGKNDYLYLNFLKKIMFIEEVDEKKEINKEKFKNKINSNFKNLFVQHILDYGKLLYYKENDEYIKNTGQLETKDLEYIKTKETLIRKMAVLVSFAANSYYNLFGRVSGDILGTEVVKSSKTNVIKVGSHIFKEKMLNYFFDFEIFDANKIVEILESISYSIYNVRNGVGHFNKLILGKYKKKDINTNKRIEEDLNNNEEIKGYFIKKRGEIERKVKEKFLSNNLQYYYSKEKIENYFEVYEFEILKRKIPFAPNFKRIIKKGEDLFNNKNNKKYEYFKNFDKNSAEEKKEFLKTRNFLLKELYYNNFYKEFLSKKEEFEKIVLEVKEEKKSRGNINNKKSGVSFQSIDDYDTKINISDYIASIHKKEMERVEKYNEEKQKDTAKYIRDFVEEIFLTGFINYLEKDKRLHFLKEEFSILCNNNNNVVDFNININEEKIKEFLKENDSKTLNLYLFFNMIDSKRISEFRNELVKYKQFTKKRLDEEKEFLGIKIELYETLIEFVILTREKLDTKKSEEIDAWLVDKLYVKDSNEYKEYEEILKLFVDEKILSSKEAPYYATDNKTPILLSNFEKTRKYGTQSFLSEIQSNYKYSKVEKENIEDYNKKEEIEQKKKSNIEKLQDLKVELHKKWEQNKITEKEIEKYNNTTRKINEYNYLKNKEELQNVYLLHEMLSDLLARNVAFFNKWERDFKFIVIAIKQFLRENDKEKVNEFLNPPDNSKGKKVYFSVSKYKNTVENIDGIHKNFMNLIFLNNKFMNRKIDKMNCAIWVYFRNYIAHFLHLHTKNEKISLISQMNLLIKLFSYDKKVQNHILKSTKTLLEKYNIQINFEISNDKNEVFKYKIKNRLYSKKGKMLGKNNKFEILENEFLENVKAMLEYSE

SEQ ID NO: 586 - protein, 1197 aa, Leptotrichia wadei
MKVTKIDGLSHKKFEDEGKLVKFRNNKNINEIKERLKKLKELKLDNYIKNPENVKNKDKDAEKETKIRRTNLKKYFSEIILRKEDEKYILKKTKKFKDINQEIDYYDVKSKKNQQEIFDVLKEILELKIKETEKEEIITFDSEKLKKVFGEDFVKKEAKIKAIEKSLKINKANYKKDSIKIGDDKYSNVKGENKRSRIYEYYKKSENLKKFEENIREAFEKLYTEENIKELYSKIEEILKKTHLKSIVREFYQNEIIGESEFSKKNGDGISILYNQIKDSIKKEENFIEFIENTGNLELKELTKSQIFYKYFLENEELNDENIKFAFCYFVEIEVNNLLKENVYKIKRFNESNKKRIENIFEYGKLKKLIVYKLENKLNNYVRNCGKYNYHMENGDIATSDINMRNRQTEAFLRSIIGVSSFGYFSLRNILGVNDDDFYETEEDLTKKERRNLEKAKEDITIKNTFDEVVVKSFQKKGIYNIKENLKMFYGDSFDNADKDELKQFFVNMLNAITSIRHRVVHYNMNTNSENIFNFSGIEVSKLLKSIFEKETDKRELKLKIFRQLNSAGVFDYWENRKIDKYLENIEFKFVNKNIPFVPSFTKLYNRIDNLKGNNALNLGYINIPKRKEARDSQIYLLKNIYYGEFVEKFVNNNDNFEKIFREIIEINKKDGTNTKTKFYKLEKFETLKANAPIEYLEKLQSLHQINYNREKVEEDKDIYVDFVQKIFLKGFINYLQGSDLLKSLNLLNLKKDEAIANKKSFYDEKLKLWQNNGSNLSKMPEEIYDYIKKIKINKINYSDRMSIFYLLLKLIDHKELTNLRGNLEKYVSMNKNKIYSEELNIVNLVSLDNNKVRANFNLKPEDIGKFLKTETSIRNINQLNNFSEIFADGENVIKHRSFYNIKKYGILDLLEKIVDKADLKITKEEIKKYENLQNELKRNDFYKIQERIHRNYNQKPFLIKNNEKDFNDYKKAIENIQNYTQLKNKIEFNDLNLLQSLLFRILHRLAGYTSLWERDLQFKLKGEYPENKYIDEIFNFDNSKNKIYNEKNERGGSVVSKYGYFLVEKDGEIQRKNARDKKKNKIIKKEGLEIRNYIAHFNYIPDATKSILEILEELRNLLKYDRKLKNAVMKSIKDIFKEYGLIIEFKISHVNNSEKIEVLNVDSEKIKHLKNNGLVTTRNSEDLCELIKMMLEYKKS

SEQ ID NO: 587 - protein, 1152 aa, Leptotrichia wadei; identical to SEQ ID NO: 58

SEQ ID NO: 588 - protein, 1159 aa, Leptotrichia buccalis
MKVTKVGGISHKKYTSEGRLVKSESEENRTDERLSALLNMRLDMYIKNPSSTETKENQKRIGKLKKFFSNKMVYLKDNTLSLKNGKKENIDREYSETDILESDVRDKKNFAVLKKIYLNENVNSEELEVFRNDIKKKLNKINSLKYSFEKNKANYQKINENNIEKVEGKSKRNIIYDYYRESAKRDAYVSNVKEAFDKLYKEEDIAKLVLEIENLTKLEKYKIREFYHEIIGRKNDKENFAKIIYEEIQNVNNMKELIEKVPDMSELKKSQVFYKYYLDKEELNDKNIKYAFCHFVEIEMSQLLKNYVYKRLSNISNDKIKRIFEYQNLKKLIENKLLNKLDTYVRNCGKYNYYLQDGEIATSDFIARNRQNEAFLRNIIGVSSVAYFSLRNILETENENDITGRMRGKTVKNNKGEEKYVSGEVDKIYNENKKNEVKENLKMFYSYDFNMDNKNEIEDFFANIDEAISSIRHGIVHFNLELEGKDIFAFKNIAPSEISKKMFQNEINEKKLKLKIFRQLNSANVFRYLEKYKILNYLKRTRFEFVNKNIPFVPSFTKLYSRIDDLKNSLGIYWKTPKTNDDNKTKEIIDAQIYLLKNIYYGEFLNYFMSNNGNFFEISKEIIELNKNDKRNLKTGFYKLQKFEDIQEKIPKEYLANIQSLYMINAGNQDEEEKDTYIDFIQKIFLKGFMTYLANNGRLSLIYIGSDEETNTSLAEKKQEFDKFLKKYEQNNNIKIPYEINEFLREIKLGNILKYTERLNMFYLILKLLNHKELTNLKGSLEKYQSANKEEAFSDQLELINLLNLDNNRVTEDFELEADEIGKFLDFNGNKVKDNKELKKFDTNKIYFDGENIIKHRAFYNIKKYGMLNLLEKIADKAGYKISIEELKKYSNKKNEIEKNHKMQENLHRKYARPRKDEKFTDEDYESYKQAIENIEEYTHLKNKVEFNELNLLQGLLLRILHRLVGYTSIWERDLRFRLKGEFPENQYIEEIFNFENKKNVKYKGGQIVEKYIKFYKELHQNDEVKINKYSSANIKVLKQEKKDLYIRNYIAHFNYIPHAEISLLEVLENLRKLLSYDRKLKNAVMKSVVDILKEYGFVATFKIGADKKIGIQTLESEKIVHLKNLKKKKLMTDRNSEELCKLVKIMFEYKMEEKKSEN

SEQ ID NO: 589 - protein, 913 aa, Leptotrichia sp.
MKELIEKVPNVSELKKSQVFYKYYLNKEKLNDENIKYVFCHFVEIEMSKLLKNYVYKKPSNISNDKVKRIFEYQSLKKLIENKLLNKLDTYIRNCGKYSFYLQDGEIATSDFIVGNRQNEAFLRNIIGVSSAAYFSLRNILETENENDITGKMRGKTVKNKKGEEKYISGEIDKLYDNNKQNEVKKNLKMFYSYDFNMNSKKEIEDFFSNIDEAISSIRHGIVHFNLELEGKDIFTFKNIVPSQISKKMFHDEINEKKLKLKIFKQLNSANVFRYLEKYKILNYLNRTRFEFVNKNIPFVPSFTKLYSRIDDLKNSLCIYWKIPKANDNNKTKEITDAQIYLLKNIYYSEFLNYFMSNNGNFFEIIKEIIELNKNDKRNLKTGFYKLQKFENLQEKTPKEYLANIQSFYMIDAGNKDEEEKDAYIDFIQKIFLKGFMTYLANNGRLSLMYIGNDEQINTSLAEKKQEFDKFLKKYEQNNNIKIPYEINEFLREIKLGNILKYTERLNMFYLILKLLNHKELTNLKGSLEKYQSANKEEAFSDQLELINLLNLDNNRVTEDFELEADEIGKFLDFNGNKVKDNKELKKFDTNKIYFDGENIIKHRAFYNIKKYGMLNLLEKISDEAKYKISIEELKNYSNKKNEIEKNHTNQENLHRKYARPRKDEKFNDEDYKKYEKAIRNIQQYTHLKNKVEFNELNLLQSLLLRILHRLVGYTSIWERDLRFRLKGEFPENQYIEEIFNFNNSKNVKYKNGQIVEKYISFYKELYKDDTEKISIYSDKKVKELKKEKKDLYIRNYIAHFNYIPNAEISLLEVLENLRKLLSYDRKLKNAIMKSIVDILKEYGFVVTFKIEKDKKIRIESLKSEEVVHLKKLKLKDNDKKKEPIKTYRNSKELCELVKVMFEYKMKEKKSEN

SEQ ID NO: 590 - protein, 1385 aa, Leptotrichia sp.
MGNLFGHKRWYEVRDKKDFKIKRKVKVKRNYDGNKYILNINENNNKEKIDNNKFIGEFVNYKKNNNVLKEFKRKFHAGNILFKLKGKEEIIRIENNDDFLETEEVVLYIEVYGKSEKLKALEITKKKIIDEAIRQGITKDDKKIEIKRQENEEEIEIDIRDEYTNKTLNDCSIILRIIENDELETKKSIYEIFKNINMSLYKIIEKIIENETEKVFENRYYEEHLREKLLKDNKIDVILTNFMEIREKIKSNLEIMGFVKFYLNVSGDKKKSENKKMFVEKILNTNVDLTVEDIVDFIVKELKFWNITKRIEKVKKFNNEFLENRRNRTYIKSYVLLDKHEKFKIERENKKDKIVKFFVENIKNNSIKEKIEKILAEFKINELIKKLEKELKKGNCDTEIFGIFKKHYKVNFDSKKFSNKSDEEKELYKIIYRYLKGRIEKILVNEQKVRLKKMEKIEIEKILNESILSEKILKRVKQYTLEHIMYLGKLRHNDIVKMTVNTDDFSRLHAKEELDLELITFFASTNMELNKIFNGKEKVTDFFGFNLNGQKITLKEKVPSFKLNILKKLNFINNENNIDEKLSHFYSFQKEGYLLRNKILHNSYGNIQETKNLKGEYENVEKLIKELKVSDEEISKSLSLDVIFEGKVDIINKINSLKIGEYKDKKYLPSFSKIVLEITRKFREINKDKLFDIESEKIILNAVKYVNKILYEKITSNEENEFLKTLPDKLVKKSNNKKENKNLLSIEEYYKNAQVSSSKGDKKAIKKYQNKVTNAYLEYLENTFTEIIDFSKFNLNYDEIKTKIEERKDNKSKIIIDSISTNINITNDIEYIISIFALLNSNTYINKIRNRFFATSVWLEKQNGTKEYDYENIISILDEVLLINLLRENNITDILDLKNAIIDAKIVENDETYIKNYIFESNEEKLKKRLFCEELVDKEDIRKIFEDENFKFKSFIKKNEIGNFKINFGILSNLECNSEVEAKKIIGKNSKKLESFIQNIIDEYKSNIRTLFSSEFLEKYKEEIDNLVEDTESENKNKFEKIYYPKEHKNELYIYKKNLFLNIGNPNFDKIYGLISKDIKNVDTKILFDDDIKKNKISEIDAILKNLNDKLNGYSNDYKAKYVNKLKENDDFFAKNIQNENYSSFGEFEKDYNKVSEYKKIRDLVEFNYLNKIESYLIDINWKLAIQMARFERDMHYIVNGLRELGIIKLSGYNTGISRAYPKRNGSDGFYTTTAYYKFFDEESYKKFEKICYGFGIDLSENSEINKPENESIRNYISHFYIVRNPFADYSIAEQIDRVSNLLSYSTRYNNSTYASVFEVFKKDVNLDYDELKKKFRLIGNNDILERLMKPKKVSVLELESYNSDYIKNLIIELLTKIENTNDTL

SEQ ID NO: 591 - protein, 1389 aa, Leptotrichia shahii; identical to SEQ ID NO: 45

SEQ ID NO: 592 - protein, 10 aa, Lactococcus lactis
FLVNHNYYSF

SEQ ID NO: 593 - protein, 16 aa, Lactococcus lactis
LQKFTGDIENLVKASL

SEQ ID NO: 594 - protein, 9 aa, Lactococcus lactis
VIVPELTFG

SEQ ID NO: 595 - protein, 15 aa, Lactococcus lactis
WIRAGWFIRNRSAHY

SEQ ID NO: 596 - protein, 13 aa, Lactococcus lactis
NKDLFAFMLSIKQ

SEQ ID NO: 597 - protein, 10 aa, Lactococcus lactis
FLHKNSYFRF

SEQ ID NO: 598 - protein, 16 aa, Lactococcus lactis
LFIFSTRLEIFWKKKI

SEQ ID NO: 599 - protein, 9 aa, Lactococcus lactis
ALVEELTFG

SEQ ID NO: 600 - protein, 15 aa, Lactococcus lactis
WMNVVRLYRNKSAHG

SEQ ID NO: 601 - protein, 13 aa, Lactococcus lactis
KSYLYGALYVFKH

SEQ ID NO: 602 - protein, 10 aa, Corynebacterium diphtheriae
LLAQLNYYRL

SEQ ID NO: 603 - protein, 16 aa, Corynebacterium diphtheriae
VFIELDRVELAIQTRL

SEQ ID NO: 604 - protein, 9 aa, Corynebacterium diphtheriae
AAVEVMDWG

SEQ ID NO: 605 - protein, 15 aa, Corynebacterium diphtheriae
WLKSLNILRNYAAHH

SEQ ID NO: 606 - protein, 13 aa, Corynebacterium diphtheriae
GQLSMIQYLHHQL

SEQ ID NO: 607 - protein, 12 aa, Shewanella baltica
MLIENDLDGIEN

SEQ ID NO: 608 - protein, 16 aa, Shewanella baltica
NYQLFYFLEKTIRNQI

SEQ ID NO: 609 - protein, 15 aa, Shewanella baltica
VMFNLNTLRNPIAHC

SEQ ID NO: 610 - protein, 13 aa, Shewanella baltica
DEKLRLEISLRDW

SEQ ID NO: 611 - protein, 12 aa, Lactococcus lactis
LREINIKASKSR

SEQ ID NO: 612 - protein, 16 aa, Lactococcus lactis
LLPLLHKYEWSLRKLI

SEQ ID NO: 613 - protein, 9 aa, Lactococcus lactis
YDFEEYLFG

SEQ ID NO: 614 - protein, 15 aa, Lactococcus lactis
DMRLIRDGRNIVGHN

SEQ ID NO: 615 - protein, 13 aa, Lactococcus lactis
LSKGLKKYIKKLD

SEQ ID NO: 616 - protein, 12 aa, Geobacter bemidjiensis
RLPLTSHIQKQD

SEQ ID NO: 617 - protein, 16 aa, Geobacter bemidjiensis
IYPKLNRIENRLRHYL

SEQ ID NO: 618 - protein, 9 aa, Geobacter bemidjiensis
FELGKIVYA

SEQ ID NO: 619 - protein, 15 aa, Geobacter bemidjiensis
KWIRLEEIRHKVAHN

SEQ ID NO: 620 - protein, 13 aa, Geobacter bemidjiensis
ANEYIDSLQSIID

SEQ ID NO: 621 - protein, 12 aa, Salmonella enterica
FVTSLEHLRQQQ

SEQ ID NO: 622 - protein, 16 aa, Salmonella enterica
AQRQLRAIELTLKALI

SEQ ID NO: 623 - protein, 9 aa, Salmonella enterica
NHYLKQHFG

SEQ ID NO: 624 - protein, 15 aa, Salmonella enterica
FLDDCRLARNEVIAR

SEQ ID NO: 625 - protein, 13 aa, Salmonella enterica
LMLLNVQYQQIVR

SEQ ID NO: 626 - protein, 12 aa, Shigella flexneri
FLWQLEYLREKQ

SEQ ID NO: 627 - protein, 16 aa, Shigella flexneri
SLQQVRALELTIRSLI

SEQ ID NO: 628 - protein, 9 aa, Shigella flexneri
LEHLNKLFG

SEQ ID NO: 629 - protein, 15 aa, Shigella flexneri
FLDDIRVIRNRLAHH

SEQ ID NO: 630 - protein, 13 aa, Shigella flexneri
TTLVNYYYREITE

SEQ ID NO: 631 - protein, 16 aa, Streptomyces avermitilis
AYIWLNLVEQRLRAVV

SEQ ID NO: 632 - protein, 9 aa, Streptomyces avermitilis
NVLSFLTLP

SEQ ID NO: 633 - protein, 11 aa, Streptomyces avermitilis
LEVTRNVVSRN

SEQ ID NO: 634 - protein, 13 aa, Streptomyces avermitilis
RYGDVVGVHPDRV

SEQ ID NO: 635 - protein, 10 aa, Helicobacter pylori
SISVLHYDYL

SEQ ID NO: 636 - protein, 16 aa, Helicobacter pylori
LFLWIHFFETALRSKM

SEQ ID NO: 637 - protein, 9 aa, Helicobacter pylori
QILNLFTLG

SEQ ID NO: 638 - protein, 15 aa, Helicobacter pylori
TFSLIRKARNDLFHN

SEQ ID NO: 639 - protein, 13 aa, Helicobacter pylori
TLKLERAIFFKTI

SEQ ID NO: 640 - protein, 11 aa, Methylomirabilis oxyfera
GPPEYYYRLCR

SEQ ID NO: 641 - protein, 16 aa, Methylomirabilis oxyfera
ADSKLKDTVSEMRKFI

SEQ ID NO: 642 - protein, 15 aa, Methylomirabilis oxyfera
WMNRINELRRIPAHP

SEQ ID NO: 643 - protein, 13 aa, Methylomirabilis oxyfera
DFEYIDFIYDELM

SEQ ID NO: 644 - protein, 12 aa, Novosphingobium aromaticivorans
TAVKQQSFGMEA

SEQ ID NO: 645 - protein, 16 aa, Novosphingobium aromaticivorans
AAAKVTQIHKKLFNYV

SEQ ID NO: 646 - protein, 15 aa, Novosphingobium aromaticivorans
WIKVLNDIRQYTAHP

SEQ ID NO: 647 - protein, 13 aa, Novosphingobium aromaticivorans
QVSFVNEVYEKVE

SEQ ID NO: 648 - protein, 11 aa, Elizabethkingia anophelis
GEIKYWRTFQK

SEQ ID NO: 649 - protein, 16 aa, Elizabethkingia anophelis
AIAYIRDIETEFKSDF

SEQ ID NO: 650 - protein, 15 aa, Elizabethkingia anophelis
WMVKLERIRNQNFHS

SEQ ID NO: 651 - protein, 13 aa, Elizabethkingia anophelis
ELSFLEELHDWIY

SEQ ID NO: 652 - protein, 12 aa, Escherichia coli
FSALPRIIEYAY

SEQ ID NO: 653 - protein, 16 aa, Escherichia coli
PFLLLSEIENHIRKLI

SEQ ID NO: 654 - protein, 9 aa, Escherichia coli
ESVADLTFG

SEQ ID NO: 655 - protein, 15 aa, Escherichia coli
ELDKVRIIRNDVMHF

SEQ ID NO: 656 - protein, 13 aa, Escherichia coli
NHELLHNFVRFIH

SEQ ID NO: 657 - protein, 12 aa, Haloarcula marismortui
FELFDTLAEDDY

SEQ ID NO: 658 - protein, 16 aa, Haloarcula marismortui
PFLQIGEIEESLRHLF

SEQ ID NO: 659 - protein, 9 aa, Haloarcula marismortui
DRPEDFSFD

SEQ ID NO: 660 - protein, 15 aa, Haloarcula marismortui
LLEDIRETRNALLHF

SEQ ID NO: 661 - protein, 13 aa, Haloarcula marismortui
DRDQLDMAHGYFT

SEQ ID NO: 662 - protein, 12 aa, Nostoc sp.
MKLLPILQQNPR

SEQ ID NO: 663 - protein, 15 aa, Nostoc sp.
FGLVTLLEMNLLRLV

SEQ ID NO: 664 - protein, 9 aa, Nostoc sp.
DLLDYLQFC

SEQ ID NO: 665 - protein, 15 aa, Nostoc sp.
FLKSAEQLRNRLAHA

SEQ ID NO: 666 - protein, 13 aa, Nostoc sp.
SWNDLISLAEAME

SEQ ID NO: 667 - protein, 10 aa, Xanthobacter autotrophicus
VFEGMELLPA

SEQ ID NO: 668 - protein, 14 aa, Xanthobacter autotrophicus
ALIPFVEKRLETSL

SEQ ID NO: 669 - protein, 8 aa, Xanthobacter autotrophicus
EAFKAVLG

SEQ ID NO: 670 - protein, 15 aa, Xanthobacter autotrophicus
LVNELGDVRNKLSHN

SEQ ID NO: 671 - protein, 13 aa, Xanthobacter autotrophicus
YDDAERALDTMRR

SEQ ID NO: 672 - protein, 10 aa, Methanospirillum hungatei
VGRAMDQLKT

SEQ ID NO: 673 - protein, 14 aa, Methanospirillum hungatei
GLMRFVEREMKSAY

SEQ ID NO: 674 - protein, 8 aa, Methanospirillum hungatei
KVFSQILG

SEQ ID NO: 675 - protein, 15 aa, Methanospirillum hungatei
LVSELRETRNQWAHQ

SEQ ID NO: 676 - protein, 13 aa, Methanospirillum hungatei
TNDTLRALDSTAR

SEQ ID NO: 677 - protein, 10 aa, Roseiflexus sp.
IGKALDLLRQ

SEQ ID NO: 678 - protein, 14 aa, Roseiflexus sp.
GLQPFIERELQNHY

SEQ ID NO: 679 - protein, 8 aa, Roseiflexus sp.
DVFRKTLG

SEQ ID NO: 680 - protein, 15 aa, Roseiflexus sp.
LVSELREWRNKWAHQ

SEQ ID NO: 681 - protein, 13 aa, Roseiflexus sp.
TDDTYRVLDSAAR

SEQ ID NO: 682 - protein, 10 aa, Plasmodium yoelii
ILNIFHILSA

SEQ ID NO: 683 - protein, 14 aa, Plasmodium yoelii
HLSPIIEQIMEMEY

SEQ ID NO: 684 - protein, 7 aa, Plasmodium yoelii
DIFENRI

SEQ ID NO: 685 - protein, 15 aa, Plasmodium yoelii
ILENLQKASIFWANQ

SEQ ID NO: 686 - protein, 13 aa, Plasmodium yoelii
EFFLSNLVSSYFF

SEQ ID NO: 687 - protein, 10 aa, Theileria parva
VVMIFQCVCD

SEQ ID NO: 688 - protein, 14 aa, Theileria parva
AFQPFISKCMLKKF

SEQ ID NO: 689 - protein, 7 aa, Theileria parva
DIFEQVL

SEQ ID NO: 690 - protein, 15 aa, Theileria parva
HLNTIQTASIYWANQ

SEQ ID NO: 691 - protein, 8 aa, Theileria parva
NYGKCRKI

SEQ ID NO: 692 - protein, 10 aa, Daphnia pulex
SSKESAAIAI

SEQ ID NO: 693 - protein, 14 aa, Daphnia pulex
GHIVFDTFLEDVAP

SEQ ID NO: 694 - protein, 8 aa, Daphnia pulex
DCFIIPPG

SEQ ID NO: 695 - protein, 15 aa, Daphnia pulex
ILERAMDGRHAVSHH

SEQ ID NO: 696 - protein, 13 aa, Daphnia pulex
WEQHLKDYVYILT

SEQ ID NO: 697 - protein, 10 aa, Homo sapiens
AGHCLLLLRS

SEQ ID NO: 698 - protein, 16 aa, Homo sapiens
CLQGFVGREVLSFHRG

SEQ ID NO: 699 - protein, 15 aa, Homo sapiens
KVTEVIKCRNEIMHS

SEQ ID NO: 700 - protein, 13 aa, Homo sapiens
SSTWLRDFQMKIQ

SEQ ID NO: 701 - protein, 10 aa, Branchiostoma floridae
VGIALLTTRD

SEQ ID NO: 702 - protein, 16 aa, Branchiostoma floridae
GLTNVTEQAAKELQAE

SEQ ID NO: 703 - protein, 15 aa, Branchiostoma floridae
PLKNVIEVRNKTMHS

SEQ ID NO: 704 - protein, 13 aa, Branchiostoma floridae
DRQTFNEYMDKME

SEQ ID NO: 705 - protein, 10 aa, Homo sapiens
VSDLEKSLGT

SEQ ID NO: 706 - protein, 14 aa, Homo sapiens
GLSSILETEMKIAF

SEQ ID NO: 707 - protein, 8 aa, Homo sapiens
KHWLAVFG

SEQ ID NO: 708 - protein, 16 aa, Homo sapiens
TIESLYKNLRKANKAV

SEQ ID NO: 709 - protein, 13 aa, Homo sapiens
SRSLLHAFSTRSN

SEQ ID NO: 710 - protein, 10 aa, Ostreococcus lucimarinus
MERLMMVLDH

SEQ ID NO: 711 - protein, 14 aa, Ostreococcus lucimarinus
VLAIVLEGGLRAEF

SEQ ID NO: 712 - protein, 8 aa, Ostreococcus lucimarinus
ANWGSLFS

SEQ ID NO: 713 - protein, 14 aa, Ostreococcus lucimarinus
EIEVLLDAAIRQRK

SEQ ID NO: 714 - protein, 13 aa, Ostreococcus lucimarinus
ARDVSSAAVALLN

SEQ ID NO: 715 - protein, 10 aa, Branchiostoma floridae
LCGMKTLLKA

SEQ ID NO: 716 - protein, 14 aa, Branchiostoma floridae
VLAVVLETEMKAVF

SEQ ID NO: 717 - protein, 8 aa, Branchiostoma floridae
KHWIAVFG

SEQ ID NO: 718 - protein, 17 aa, Branchiostoma floridae
HLDSLVKHFTRGRSYGV

SEQ ID NO: 719 - protein, 13 aa, Branchiostoma floridae
ALQLVRQLHNHST

SEQ ID NO: 720 - protein, 10 aa, Microcystis aeruginosa
LNWLDQLHDD

SEQ ID NO: 721 - protein, 16 aa, Microcystis aeruginosa
LIELCGWIEETMDDIV

SEQ ID NO: 722 - protein, 9 aa, Microcystis aeruginosa
FRKMLMMVI

SEQ ID NO: 723 - protein, 15 aa, Microcystis aeruginosa
YLGNLKDSRNRAAHT

SEQ ID NO: 724 - protein, 13 aa, Microcystis aeruginosa
FDKIYGLLKELDA

SEQ ID NO: 725 - protein, 12 aa, Lactococcus lactis
LSELHEFIKKLN

SEQ ID NO: 726 - protein, 16 aa, Lactococcus lactis
VIRSCGIIEQLTKTLI

SEQ ID NO: 727 - protein, 9 aa, Lactococcus lactis
INGLIDTFD

SEQ ID NO: 728 - protein, 15 aa, Lactococcus lactis
HIDSLRQLRNSIAHG

SEQ ID NO: 729 - protein, 13 aa, Lactococcus lactis
MGYFDSCIILMFR

SEQ ID NO: 730 - protein, 12 aa, Frankia sp.
LSELAALVQDQA

SEQ ID NO: 731 - protein, 16 aa, Frankia sp.
VIRSCGYLEQTVAGTF

SEQ ID NO: 732 - protein, 9 aa, Frankia sp.
LETLAGRFD

SEQ ID NO: 733 - protein, 15 aa, Frankia sp.
ELATLVDRRNRIAHG

SEQ ID NO: 734 - protein, 13 aa, Frankia sp.
LELHRVACEAADW

SEQ ID NO: 735 - protein, 10 aa, Neisseria meningitidis
CCSIFSDFRM

SEQ ID NO: 736 - protein, 16 aa, Neisseria meningitidis
LFHVVSIFEIVLRNKI

SEQ ID NO: 737 - protein, 9 aa, Neisseria meningitidis
QLVAGLGFG

SEQ ID NO: 738 - protein, 15 aa, Neisseria meningitidis
ELSNINKFRNRLAHH

SEQ ID NO: 739 - protein, 13 aa, Neisseria meningitidis
DVDTASVFSHFSD

SEQ ID NO: 740 - protein, 10 aa, Pseudomonas syringae
LEKHFSSARL

SEQ ID NO: 741 - protein, 16 aa, Pseudomonas syringae
MMPMLSVLEIALKNGI

SEQ ID NO: 742 - protein, 9 aa, Pseudomonas syringae
KIVAELAFG

SEQ ID NO: 743 - protein, 15 aa, Pseudomonas syringae
ALNLIRNLRNRVFHH

SEQ ID NO: 744 - protein, 13 aa, Pseudomonas syringae
DPQLVPWLAQYDR

SEQ ID NO: 745 - protein, 10 aa, Geobacter uraniireducens
LRRAISHERL

SEQ ID NO: 746 - protein, 16 aa, Geobacter uraniireducens
LYTPLQCLEVCLRNSI

SEQ ID NO: 747 - protein, 9 aa, Geobacter uraniireducens
RIIPELTFG

SEQ ID NO: 748 - protein, 15 aa, Geobacter uraniireducens
RFNHIRTLRNRIFHH

SEQ ID NO: 749 - protein, 13 aa, Geobacter uraniireducens
NPAMMTFVEPFDS

SEQ ID NO: 750 - protein, 16 aa, Sulfuricurvum kujiense
EEKSEFIREFFKRTLH

SEQ ID NO: 751 - protein, 9 aa, Sulfuricurvum kujiense
TQTINSFLG

SEQ ID NO: 752 - protein, 14 aa, Sulfuricurvum kujiense
FRNYLKRLRNAVSH

SEQ ID NO: 753 - protein, 13 aa, Sulfuricurvum kujiense
VNLLITLLSRNIL

SEQ ID NO: 754 - protein, 13 aa, Dethiobacter alkaliphilus
QVVEKDFVARTMH

SEQ ID NO: 755 - protein, 9 aa, Dethiobacter alkaliphilus
TLLINCLLG

SEQ ID NO: 756 - protein, 14 aa, Dethiobacter alkaliphilus
ASRFLQCMRNSVAH

SEQ ID NO: 757 - protein, 10 aa, Dethiobacter alkaliphilus
LATKLAQYVQ

SEQ ID NO: 758 - protein, 13 aa, Klebsiella pneumoniae
SDFETDFVQRTLA

SEQ ID NO: 759 - protein, 9 aa, Klebsiella pneumoniae
TLTLNCLLG

SEQ ID NO: 760 - protein, 14 aa, Klebsiella pneumoniae
LRQLIHKMRNSVAH

SEQ ID NO: 761 - protein, 13 aa, Klebsiella pneumoniae
LLPFLKYYATLLL

SEQ ID NO: 762 - protein, 10 aa, Lactobacillus casei
KIDREMFWRR

SEQ ID NO: 763 - protein, 16 aa, Lactobacillus casei
YLLLYSSWEGFIRSIA

SEQ ID NO: 764 - protein, 9 aa, Lactobacillus casei
LARIVSVLD

SEQ ID NO: 765 - protein, 14 aa, Lactobacillus casei
DRDLLKVRNEIAHG

SEQ ID NO: 766 - protein, 13 aa, Lactobacillus casei
TVSHVLEMMDLFS

SEQ ID NO: 767 - protein, 10 aa, Caulobacter sp.
DLDAARLRRA

SEQ ID NO: 768 - protein, 16 aa, Caulobacter sp.
IVLAYSHWEGFYNECI

SEQ ID NO: 769 - protein, 9 aa, Caulobacter sp.
LKENFRILG

SEQ ID NO: 770 - protein, 14 aa, Caulobacter sp.
NKELVGWRHSIAHG

SEQ ID NO: 771 - protein, 13 aa, Caulobacter sp.
HIILTNSLLLTLS

SEQ ID NO: 772 - protein, 10 aa, Microcystis aeruginosa
NLDEDMAWRI

SEQ ID NO: 773 - protein, 16 aa, Microcystis aeruginosa
ITTLYAHWEGFIKYAA

SEQ ID NO: 774 - protein, 9 aa, Microcystis aeruginosa
FTDICTILG

SEQ ID NO: 775 - protein, 14 aa, Microcystis aeruginosa
DEQLLTQRNKIAHG

SEQ ID NO: 776 - protein, 13 aa, Microcystis aeruginosa
TYNLVIKLIRDFK

SEQ ID NO: 777 - protein, 11 aa, Arabidopsis thaliana
PWLSWEEWDSV

SEQ ID NO: 778 - protein, 15 aa, Arabidopsis thaliana
GSLPAPVDVTCSLIE

SEQ ID NO: 779 - protein, 9 aa, Arabidopsis thaliana
IADAARAIG

SEQ ID NO: 780 - protein, 15 aa, Arabidopsis thaliana
IPRKLIDLRHEGSHR

SEQ ID NO: 781 - protein, 13 aa, Arabidopsis thaliana
AADEALEWLKSYY

SEQ ID NO: 782 - protein, 11 aa, Homo sapiens
AWLSRAEWDQV

SEQ ID NO: 783 - protein, 16 aa, Homo sapiens
GNELPLAVASTADLIR

SEQ ID NO: 784 - protein, 9 aa, Homo sapiens
LKCLAQEVN

SEQ ID NO: 785 - protein, 15 aa, Homo sapiens
IPDWIVDLRHELTHK

SEQ ID NO: 786 - protein, 13 aa, Homo sapiens
GCYFVLDWLQKTY

SEQ ID NO: 787 - protein, 11 aa, Saccharomyces cerevisiae
PWRDFAELEEL

SEQ ID NO: 788 - protein, 16 aa, Saccharomyces cerevisiae
SQYLPHVVDSTAQITC

SEQ ID NO: 789 - protein, 9 aa, Saccharomyces cerevisiae
LHTLAAKIG

SEQ ID NO: 790 - protein, 15 aa, Saccharomyces cerevisiae
LPSWFVDLRHWGTHE

SEQ ID NO: 791 - protein, 13 aa, Saccharomyces cerevisiae
AANEALSWLYDHY

SEQ ID NO: 792 - protein, 11 aa, Streptococcus pneumoniae
SKPCIEAENMI

SEQ ID NO: 793 - protein, 16 aa, Streptococcus pneumoniae
AFMARRALEQAVHWIY

SEQ ID NO: 794 - protein, 8 aa, Streptococcus pneumoniae
SSLVWDDD

SEQ ID NO: 795 - protein, 15 aa, Streptococcus pneumoniae
QIVLLIRWGNHAAHG

SEQ ID NO: 796 - protein, 13 aa, Streptococcus pneumoniae
ALHHLYQFVNFID

SEQ ID NO: 797 - protein, 11 aa, Microcystis aeruginosa
YDHASQAEGLV

SEQ ID NO: 798 - protein, 16 aa, Microcystis aeruginosa
CFYTRFVLEQMVCWLY

SEQ ID NO: 799 - protein, 8 aa, Microcystis aeruginosa
GALIHEQT

SEQ ID NO: 800 - protein, 15 aa, Microcystis aeruginosa
KIRTIHKVGNNAAHD

SEQ ID NO: 801 - protein, 13 aa, Microcystis aeruginosa
LIEELFHLTYWLV

SEQ ID NO: 802 - protein, 11 aa, Escherichia coli
YAIACAAENNY

SEQ ID NO: 803 - protein, 16 aa, Escherichia coli
LIKMRMFGEATAKHLG

SEQ ID NO: 804 - protein, 8 aa, Escherichia coli
HDLLRELG

SEQ ID NO: 805 - protein, 15 aa, Escherichia coli
VFHKLRRIGNQAVHE

SEQ ID NO: 806 - protein, 13 aa, Escherichia coli
CLRLGFRLAVWYY

SEQ ID NO: 807 - protein, 11 aa, Bradyrhizobium japonicum
VQKLIKASQLA

SEQ ID NO: 808 - protein, 16 aa, Bradyrhizobium japonicum
LTEVRRAMKAAADLFW

SEQ ID NO: 809 - protein, 10 aa, Bradyrhizobium japonicum
LNRLQEFARV

SEQ ID NO: 810 - protein, 13 aa, Bradyrhizobium japonicum
RRLNDLASKGVHA

SEQ ID NO: 811 - protein, 13 aa, Bradyrhizobium japonicum
AEARQGLVGLYFF

SEQ ID NO: 812 - protein, 11 aa, Leptospira meyeri
LPKFSAIYSNL

SEQ ID NO: 813 - protein, 16 aa, Leptospira meyeri
VHSCRRLLQSVADKLM

SEQ ID NO: 814 - protein, 10 aa, Leptospira meyeri
INRLIYYIET

SEQ ID NO: 815 - protein, 13 aa, Leptospira meyeri
DSVFQASQKGSHS

SEQ ID NO: 816 - protein, 13 aa, Leptospira meyeri
QEADRYVIHTFLL

SEQ ID NO: 817 - protein, 11 aa, Bacteroides coprosuis
VVDDRDFSLLA

SEQ ID NO: 818 - protein, 16 aa, Bacteroides coprosuis
LDRLHTYVIKFIRQLC

SEQ ID NO: 819 - protein, 9 aa, Bacteroides coprosuis
FGKYVKFIV

SEQ ID NO: 820 - protein, 16 aa, Bacteroides coprosuis
IEAFNDIRNNKSFAHD

SEQ ID NO: 821 - protein, 13 aa, Bacteroides coprosuis
YAESVLIFNNVTN

SEQ ID NO: 822 - protein, 10 aa, Escherichia coli
NVNENIYQAL

SEQ ID NO: 823 - protein, 16 aa, Escherichia coli
YDRVHTALHASLRQMC

SEQ ID NO: 824 - protein, 9 aa, Escherichia coli
LSLITAHLK

SEQ ID NO: 825 - protein, 16 aa, Escherichia coli
LHGINNLRNNYSMAHP

SEQ ID NO: 826 - protein, 13 aa, Escherichia coli
EADARFAINLVRS

SEQ ID NO: 827 - protein, 11 aa, Lactococcus lactis
IMNIGYVEKIL

SEQ ID NO: 828 - protein, 16 aa, Lactococcus lactis
VTKSRTIIETVFIAIL

SEQ ID NO: 829 - protein, 9 aa, Lactococcus lactis
RSLVNKTLG

SEQ ID NO: 830 - protein, 16 aa, Lactococcus lactis
VDSITTMRNINSDSHG

SEQ ID NO: 831 - protein, 13 aa, Lactococcus lactis
EAEAELILNSAVN

SEQ ID NO: 832 - protein, 11 aa, Peptoniphilus indolicus
FLYLKTLKNKE

SEQ ID NO: 833 - protein, 16 aa, Peptoniphilus indolicus
RGITPLVTELFILIID

SEQ ID NO: 834 - protein, 9 aa, Peptoniphilus indolicus
LIEIIKNER

SEQ ID NO: 835 - protein, 15 aa, Peptoniphilus indolicus
IRDVEGKLRNRAAHE

SEQ ID NO: 836 - protein, 13 aa, Peptoniphilus indolicus
GNNHYDSYDLMNK

SEQ ID NO: 837 - protein, 11 aa, Mycobacterium tuberculosis
ISALALLAKRE

SEQ ID NO: 838 - protein, 16 aa, Mycobacterium tuberculosis
RSATPAITIVLRAAVA

SEQ ID NO: 839 - protein, 9 aa, Mycobacterium tuberculosis
WLALLRQFA

SEQ ID NO: 840 - protein, 15 aa, Mycobacterium tuberculosis
LGRFESRVRNTAAHE

SEQ ID NO: 841 - protein, 11 aa, Mycobacterium tuberculosis
ADLTLYDRLND

SEQ ID NO: 842 - protein, 12 aa, Streptococcus thermophilus
YLMIDVLKEREH

SEQ ID NO: 843 - protein, 16 aa, Streptococcus thermophilus
IEEIIKKDHEGLIVFD

SEQ ID NO: 844 - protein, 9 aa, Streptococcus thermophilus
YLNILEFYE

SEQ ID NO: 845 - protein, 14 aa, Streptococcus thermophilus
ILSLNGERNKVAHG

SEQ ID NO: 846 - protein, 13 aa, Streptococcus thermophilus
DSSYFNYYDKQNK

SEQ ID NO: 847 - protein, 10 aa, Synechocystis sp.
LISVVAFRLG

SEQ ID NO: 848 - protein, 16 aa, Synechocystis sp.
ILDHRKQINFALNNGG

SEQ ID NO: 849 - protein, 10 aa, Synechocystis sp.
TEIRNDLAHC

SEQ ID NO: 850 - protein, 12 aa, Synechocystis sp.
NKIFPQLEEIAN

SEQ ID NO: 851 - protein, 5 aa, Methanocaldococcus jannaschii
KNTLF

SEQ ID NO: 852 - protein, 14 aa, Methanocaldococcus jannaschii
KENPNSQYIKNEIS

SEQ ID NO: 853 - protein, 15 aa, Methanocaldococcus jannaschii
ENIDKFKIRNFLAHA

SEQ ID NO: 854 - protein, 13 aa, Methanocaldococcus jannaschii
SEKTSLRYNKNYI

SEQ ID NO: 855 - protein, 11 aa, Pyrococcus furiosus
SKIFESLPRIG

SEQ ID NO: 856 - protein, 15 aa, Pyrococcus furiosus
RQVEWLRNLVYGRLW

SEQ ID NO: 857 - protein, 15 aa, Pyrococcus furiosus
TIESPNVVRNFIAHS

SEQ ID NO: 858 - protein, 13 aa, Pyrococcus furiosus
DKEKAANLAYEAL

SEQ ID NO: 859 - protein, 5 aa, Sulfolobus solfataricus
AETYA

SEQ ID NO: 860 - protein, 13 aa, Sulfolobus solfataricus
DKVTRAIIENEVD

SEQ ID NO: 861 - protein, 13 aa, Sulfolobus solfataricus
GKGFDKRILYAHG

SEQ ID NO: 862 - protein, 10 aa, Sulfolobus solfataricus
DKIDEIERQI

SEQ ID NO: 863 - protein, 12 aa, Desulfococcus oleovorans
FANAERRFDEGK

SEQ ID NO: 864 - protein, 16 aa, Desulfococcus oleovorans
VLRLYRIVEMAGQQRL

SEQ ID NO: 865 - protein, 9 aa, Desulfococcus oleovorans
GYSLLKEMG

SEQ ID NO: 866 - protein, 17 aa, Desulfococcus oleovorans
SFLKIQDSRNHSFLAHG

SEQ ID NO: 867 - protein, 13 aa, Desulfococcus oleovorans
YMSLRDFIVSLNI

SEQ ID NO: 868 - protein, 12 aa, Oscillochloris trichoides
LRNAERRAARAR

SEQ ID NO: 869 - protein, 16 aa, Oscillochloris trichoides
VARLYRATELFAQIRL

SEQ ID NO: 870 - protein, 9 aa, Oscillochloris trichoides
SYALLGKLD

SEQ ID NO: 871 - protein, 17 aa, Oscillochloris trichoides
PLNNALTRRNQSILAHG

SEQ ID NO: 872 - protein, 13 aa, Oscillochloris trichoides
YHDLASHLYTLIN

SEQ ID NO: 873 - protein, 12 aa, Homo sapiens
FPEIFDALESLQ

SEQ ID NO: 874 - protein, 14 aa, Homo sapiens
KLTSCLERALGDVF

SEQ ID NO: 875 - protein, 9 aa, Homo sapiens
SEELAQVFS

SEQ ID NO: 876 - protein, 15 aa, Homo sapiens
GSPCGLNLRNVLWHG

SEQ ID NO: 877 - protein, 13 aa, Homo sapiens
YCSMMILLTAGLG

SEQ ID NO: 878 - protein, 12 aa, Entamoeba histolytica
WFESFQEIIQTP

SEQ ID NO: 879 - protein, 14 aa, Entamoeba histolytica
LLSVQFNVHLKDNI

SEQ ID NO: 880 - protein, 9 aa, Entamoeba histolytica
KMYEEHTVP

SEQ ID NO: 881 - protein, 15 aa, Entamoeba histolytica
GPPTGLNLRNLLWHG

SEQ ID NO: 882 - protein, 13 aa, Entamoeba histolytica
HICLLIILYQTIQ

SEQ ID NO: 883 - protein, 12 aa, Staphylococcus aureus
IEHGISRFLEKD

SEQ ID NO: 884 - protein, 14 aa, Staphylococcus aureus
ILVPQFESTVRRMF

SEQ ID NO: 885 - protein, 9 aa, Staphylococcus aureus
RDDVKSTLG

SEQ ID NO: 886 - protein, 15 aa, Staphylococcus aureus
VEQSGLNLRNEIAHG

SEQ ID NO: 887 - protein, 12 aa, Staphylococcus aureus
KCILVIYLFLIL

SEQ ID NO: 888 - protein, 12 aa, Cyanothece sp.
LLKGIQAYLEED

SEQ ID NO: 889 - protein, 14 aa, Cyanothece sp.
LLIPQIEAAIRNLV

SEQ ID NO: 890 - protein, 9 aa, Cyanothece sp.
SEQVKQSLG

SEQ ID NO: 891 - protein, 15 aa, Cyanothece sp.
TDQRGWNVRNNVCHG

SEQ ID NO: 892 - protein, 12 aa, Cyanothece sp.
LTERLIHILLIL

SEQ ID NO: 893 - protein, 9 aa, Sulfolobus solfataricus
ISTSAEVYY

SEQ ID NO: 894 - protein, 16 aa, Sulfolobus solfataricus
CEKYYKAAEEAIKLLV

SEQ ID NO: 895 - protein, 8 aa, Sulfolobus solfataricus
KLLRSNNT

SEQ ID NO: 896 - protein, 15 aa, Sulfolobus solfataricus
LWKSAWTLHVEGFHE

SEQ ID NO: 897 - protein, 13 aa, Sulfolobus solfataricus
LKEDVRKLVIFAV

SEQ ID NO: 898 - protein, 9 aa, Pyrobaculum aerophilum
YAEAARELL

SEQ ID NO: 899 - protein, 16 aa, Pyrobaculum aerophilum
SEKAWGAAALAVKAYA

SEQ ID NO: 900 - protein, 7 aa, Pyrobaculum aerophilum
KIAGELG

SEQ ID NO: 901 - protein, 14 aa, Pyrobaculum aerophilum
AWAQANAMHINFYE

SEQ ID NO: 902 - protein, 13 aa, Pyrobaculum aerophilum
ALKKVSRLVEELT

SEQ ID NO: 903 - protein, 11 aa, Homo sapiens
RRWLRQARANF

SEQ ID NO: 904 - protein, 16 aa, Homo sapiens
NEWVCFKCYLSTKLAL

SEQ ID NO: 905 - protein, 8 aa, Homo sapiens
AQKIEEYS

SEQ ID NO: 906 - protein, 15 aa, Homo sapiens
VHTLEAYGVDSLKTR

SEQ ID NO: 907 - protein, 13 aa, Homo sapiens
  MOD_RES (2)..(2): Any amino acid
VXECTACIIIKLE

SEQ ID NO: 908 - protein, 11 aa, Heamophilus influenzae
KLNLNVLDAAF

SEQ ID NO: 909 - protein, 16 aa, Heamophilus influenzae
  MOD_RES (14)..(15): Any amino acid
IQKFEFVYELSLKXXK

SEQ ID NO: 910 - protein, 8 aa, Heamophilus influenzae
LREALRFG

SEQ ID NO: 911 - protein, 15 aa, Heamophilus influenzae
  MOD_RES (8)..(8): Any amino acid
KWVAYRDXRNITSHT

SEQ ID NO: 912 - protein, 13 aa, Heamophilus influenzae
DFLIESSFLLEQL

SEQ ID NO: 913 - protein, 6 aa, Thermus thermophilus
  MOD_RES (1)..(1): Any amino acid
XAEKAL

SEQ ID NO: 914 - protein, 16 aa, Thermus thermophilus
IQRFEYTFEAFWKALQ

SEQ ID NO: 915 - protein, 8 aa, Thermus thermophilus
IRLAREVG

SEQ ID NO: 916 - protein, 15 aa, Thermus thermophilus
  MOD_RES (5)..(5): Any amino acid
LALGXVDDRSLTVHT

SEQ ID NO: 917 - protein, 13 aa, Thermus thermophilus
  MOD_RES (12)..(12): Any amino acid
IFRRLPDYARLXE

SEQ ID NO: 918 - protein, 11 aa, Rhodococcus equi
VNLLRRADGLL

SEQ ID NO: 919 - protein, 16 aa, Rhodococcus equi
FCAAYVGALRGAAAVL

SEQ ID NO: 920 - protein, 8 aa, Rhodococcus equi
WVLMARAE

SEQ ID NO: 921 - protein, 15 aa, Rhodococcus equi
YFAGYSGLRADLEAG

SEQ ID NO: 922 - protein, 13 aa, Rhodococcus equi
DAEEVDGFYAEVG

SEQ ID NO: 923 - protein, 11 aa, Streptomyces avermitilis
LDLLAQARAGL

SEQ ID NO: 924 - protein, 16 aa, Streptomyces avermitilis
YATAHLAALRTAAAVL

SEQ ID NO: 925 - protein, 8 aa, Streptomyces avermitilis
WEVLPEIA

SEQ ID NO: 926 - protein, 15 aa, Streptomyces avermitilis
LFASGAGRRARAEAG

SEQ ID NO: 927 - protein, 13 aa, Streptomyces avermitilis
SNRDADDLIRDVA

SEQ ID NO: 928 - protein, 11 aa, Staphylococcus aureus
ALIVEELFEYA

SEQ ID NO: 929 - protein, 16 aa, Staphylococcus aureus
PSLTVQVAMAGAMLIG

SEQ ID NO: 930 - protein, 8 aa, Staphylococcus aureus
TEAVKQSD

SEQ ID NO: 931 - protein, 10 aa, Staphylococcus aureus
HLCQFVMSGQ

SEQ ID NO: 932 - protein, 13 aa, Staphylococcus aureus
SEKLLESLENFWN

SEQ ID NO: 933 - protein, 11 aa, Enterococcus faecium
NFLLCNFSNLW

SEQ ID NO: 934 - protein, 16 aa, Enterococcus faecium
LELLSQLQKNTLQLIR

SEQ ID NO: 935 - protein, 10 aa, Enterococcus faecium
KKFAKTTARL

SEQ ID NO: 936 - protein, 13 aa, Enterococcus faecium
KVELFEAYKNSLL

SEQ ID NO: 937 - protein, 9 aa, Escherichia coli
GVYANELRA

SEQ ID NO: 938 - protein, 16 aa, Escherichia coli
GGIREIEFIVQVFQLI

SEQ ID NO: 939 - protein, 8 aa, Escherichia coli
TLSAIAEL

SEQ ID NO: 940 - protein, 15 aa, Escherichia coli
EQLRVAYLFLRRLEN

SEQ ID NO: 941 - protein, 13 aa, Escherichia coli
LTGHMTNVRRVFN

SEQ ID NO: 942 - protein, 11 aa, Sebaldella termitidis
SRCMKIAQSGQ

SEQ ID NO: 943 - protein, 16 aa, Sebaldella termitidis
IAEAEFINESIYMIYL

SEQ ID NO: 944 - protein, 8 aa, Sebaldella termitidis
KDMQFLPI

SEQ ID NO: 945 - protein, 14 aa, Sebaldella termitidis
NLLNNLISIQNSEK

SEQ ID NO: 946 - protein, 13 aa, Sebaldella termitidis
AEKICGLIINELK

SEQ ID NO: 947 - protein, 10 aa, Streptomyces coelicolor
ARLDAYANSH

SEQ ID NO: 948 - protein, 16 aa, Streptomyces coelicolor
LDAADSIGFLLELLFA

SEQ ID NO: 949 - protein, 8 aa, Streptomyces coelicolor
WELDRFPL

SEQ ID NO: 950 - protein, 14 aa, Streptomyces coelicolor
ELLATLGRITGAGG

SEQ ID NO: 951 - protein, 13 aa, Streptomyces coelicolor
QRELFGRVEAAAR

SEQ ID NO: 952 - protein, 11 aa, Flavobacterium psychrophilum
YSIYKNARQLR

SEQ ID NO: 953 - protein, 16 aa, Flavobacterium psychrophilum
TSLLILSSEEVIKSIL

SEQ ID NO: 954 - protein, 8 aa, Flavobacterium psychrophilum
QLIELSIG

SEQ ID NO: 955 - protein, 15 aa, Flavobacterium psychrophilum
KLTEFDDKKNQGFYV

SEQ ID NO: 956 - protein, 13 aa, Flavobacterium psychrophilum
KTEFTETKVVVDR

SEQ ID NO: 957 - protein, 10 aa, Lactococcus lactis
KCIDHISVLI

SEQ ID NO: 958 - protein, 16 aa, Lactococcus lactis
TFISITIIEEVGKTHI

SEQ ID NO: 959 - protein, 8 aa, Lactococcus lactis
SLPTIKMG

SEQ ID NO: 960 - protein, 14 aa, Lactococcus lactis
TGELISIRESSLYA

SEQ ID NO: 961 - protein, 13 aa, Lactococcus lactis
KEQSRALLLYAIE

SEQ ID NO: 962 - protein, 11 aa, Pseudomonas putida
DALLTNAASLI

SEQ ID NO: 963 - protein, 16 aa, Pseudomonas putida
FALAHLAREEIAKTLM

SEQ ID NO: 964 - protein, 8 aa, Pseudomonas putida
TINSIVFC

SEQ ID NO: 965 - protein, 12 aa, Pseudomonas putida
FRNDLKNNSLYV

SEQ ID NO: 966 - protein, 13 aa, Pseudomonas putida
AERALRTITLAWD

SEQ ID NO: 967 - protein, 11 aa, Selenomonas sputigena
QIAYYLYFMYL

SEQ ID NO: 968 - protein, 16 aa, Selenomonas sputigena
MTSFAYYKSYFDRVTA

SEQ ID NO: 969 - protein, 10 aa, Selenomonas sputigena
RLCEFYEEFD

SEQ ID NO: 970 - protein, 17 aa, Selenomonas sputigena
IIDKAQALRYANPLTHS

SEQ ID NO: 971 - protein, 13 aa, Selenomonas sputigena
IRELSTLLDRYIA

SEQ ID NO: 972 - protein, 11 aa, Lactobacillus helveticus
WISYYLYFESI

SEQ ID NO: 973 - protein, 16 aa, Lactobacillus helveticus
LTSYAFFKNYFDRTTA

SEQ ID NO: 974 - protein, 10 aa, Lactobacillus helveticus
QLQKVYRILN

SEQ ID NO: 975 - protein, 17 aa, Lactobacillus helveticus
IISKANDLRNNNPLSHA

SEQ ID NO: 976 - protein, 13 aa, Lactobacillus helveticus
IATMRSLFKLLVE

SEQ ID NO: 977 - protein, 11 aa, Lactococcus lactis
KILNFIYFRAK

SEQ ID NO: 978 - protein, 16 aa, Lactococcus lactis
LESFAYYKNYFDRFVA

SEQ ID NO: 979 - protein, 10 aa, Lactococcus lactis
KLIDGLKQLN

SEQ ID NO: 980 - protein, 17 aa, Lactococcus lactis
IINEAHKIRNSNPVSHS

SEQ ID NO: 981 - protein, 13 aa, Lactococcus lactis
LNDLKIIIEQLST

SEQ ID NO: 982 - protein, 11 aa, Pseudomonas sp.
KWLFIDQMVDL

SEQ ID NO: 983 - protein, 12 aa, Pseudomonas sp.
FKFREIRIEYSQ

SEQ ID NO: 984 - protein, 9 aa, Pseudomonas sp.
YEYAQEIRS

SEQ ID NO: 985 - protein, 14 aa, Pseudomonas sp.
RKIPDFRGKYAAHI

SEQ ID NO: 986 - protein, 13 aa, Pseudomonas sp.
KALEFYNWIHSNE

SEQ ID NO: 987 - protein, 11 aa, Vibrio paracholerae
EEILSGLIGDL

SEQ ID NO: 988 - protein, 12 aa, Vibrio paracholerae
RKYVELNQKYGK

SEQ ID NO: 989 - protein, 10 aa, Vibrio paracholerae
GVYNNEINKN

SEQ ID NO: 990 - protein, 14 aa, Vibrio paracholerae
TAIKKLRNHCVAHV

SEQ ID NO: 991 - protein, 13 aa, Vibrio paracholerae
FADEFLDWICPDN

SEQ ID NO: 992 - protein, 11 aa, Escherichia coli
TMADHMVNEAW

SEQ ID NO: 993 - protein, 16 aa, Escherichia coli
FNLILQSIEFRLKGLI

SEQ ID NO: 994 - protein, 10 aa, Escherichia coli
KVYNTFASKS

SEQ ID NO: 995 - protein, 14 aa, Escherichia coli
WFNSMRILRNRFMH

SEQ ID NO: 996 - protein, 13 aa, Escherichia coli
DIMPELIFTSVVR

SEQ ID NO: 997 - protein, 11 aa, Geobacter sulfurreducens
LNYEALYVKSK

SEQ ID NO: 998 - protein, 16 aa, Geobacter sulfurreducens
QLWASMALELLAKSSL

SEQ ID NO: 999 - protein, 9 aa, Geobacter sulfurreducens
QRLGHISKL

SEQ ID NO: 1000 - protein, 15 aa, Geobacter sulfurreducens
FCEQLSLRRNSEIHS

SEQ ID NO: 1001 - protein, 13 aa, Geobacter sulfurreducens
DAWEVKYWYAIEV

SEQ ID NO: 1002 - protein, 11 aa, Streptomyces coelicolor
DVSYTPVSNGM

SEQ ID NO: 1003 - protein, 16 aa, Streptomyces coelicolor
VLHLQAATEVLLKARL

SEQ ID NO: 1004 - protein, 10 aa, Streptomyces coelicolor
DRLRDIARLD

SEQ ID NO: 1005 - protein, 15 aa, Streptomyces coelicolor
RIKEPGESRNALQHY

SEQ ID NO: 1006 - protein, 13 aa, Streptomyces coelicolor
YAIESRAARVLDF

SEQ ID NO: 1007 - protein, 10 aa, Leptospira interrogans
CTRLYNQILE

SEQ ID NO: 1008 - protein, 16 aa, Leptospira interrogans
YTKLFNILDKVAAIVY

SEQ ID NO: 1009 - protein, 6 aa, Leptospira interrogans
FPSTFG

SEQ ID NO: 1010 - protein, 13 aa, Leptospira interrogans
HHLRVRRNNIVHW

SEQ ID NO: 1011 - protein, 13 aa, Leptospira interrogans
EEDVQRLFLISKA

SEQ ID NO: 1012 - protein, 10 aa, Shigella boydii
MEMVLNRLKS

SEQ ID NO: 1013 - protein, 16 aa, Shigella boydii
FRLCFGILDKIAVAIC

SEQ ID NO: 1014 - protein, 8 aa, Shigella boydii
PQKNIYFQ

SEQ ID NO: 1015 - protein, 15 aa, Shigella boydii
ELAFYKEWRNGLEHK

SEQ ID NO: 1016 - protein, 13 aa, Shigella boydii
IHHFEHLLQITRS

SEQ ID NO: 1017 - protein, 10 aa, Enterococcus faecalis
FYSLFNQIKQ

SEQ ID NO: 1018 - protein, 16 aa, Enterococcus faecalis
YRSVYSIFDKIAYFLN

SEQ ID NO: 1019 - protein, 8 aa, Enterococcus faecalis
PKNLITFH

SEQ ID NO: 1020 - protein, 15 aa, Enterococcus faecalis
NLEKIAEIRNAMEHK

SEQ ID NO: 1021 - protein, 13 aa, Enterococcus faecalis
EKITLELFKLTRE

SEQ ID NO: 1022 - protein, 10 aa, Clostridium thermocellum
FNNRAFDLIV

SEQ ID NO: 1023 - protein, 16 aa, Clostridium thermocellum
YTRFEGLIDTIYHIIN

SEQ ID NO: 1024 - protein, 7 aa, Clostridium thermocellum
KPSSEFR

SEQ ID NO: 1025 - protein, 15 aa, Clostridium thermocellum
VYKKINKFRNNIVHN

SEQ ID NO: 1026 - protein, 13 aa, Clostridium thermocellum
YTTSTEFLNNIKD

SEQ ID NO: 1027 - protein, 10 aa, Bacillus cereus
LNNRIFQLDL

SEQ ID NO: 1028 - protein, 16 aa, Bacillus cereus
FPKAFTALDLLAHLLF

SEQ ID NO: 1029 - protein, 7 aa, Bacillus cereus
KTEKKIK

SEQ ID NO: 1030 - protein, 15 aa, Bacillus cereus
EFQKASKVRNDIIHN

SEQ ID NO: 1031 - protein, 13 aa, Bacillus cereus
YTPSKEILNIARG

SEQ ID NO: 1032 - protein, 10 aa, Pseudomonas syringae
EYLRCKDAFE

SEQ ID NO: 1033 - protein, 16 aa, Pseudomonas syringae
SSFIHHLYELYMALFA

SEQ ID NO: 1034 - protein, 8 aa, Pseudomonas syringae
SIDRGAVS

SEQ ID NO: 1035 - protein, 16 aa, Pseudomonas syringae
FGPAFRSMRNKIAGHV

SEQ ID NO: 1036 - protein, 13 aa, Pseudomonas syringae
VKLTEFFQKYHPY

SEQ ID NO: 1037 - protein, 10 aa, Burkholderia xenovorans
EYLRCDDALH

SEQ ID NO: 1038 - protein, 16 aa, Burkholderia xenovorans
ARFIHHLYEFNIACAQ

SEQ ID NO: 1039 - protein, 8 aa, Burkholderia xenovorans
RVRRQAYN

SEQ ID NO: 1040 - protein, 16 aa, Burkholderia xenovorans
FAKAFRTARNTTNGHA

SEQ ID NO: 1041 - protein, 13 aa, Burkholderia xenovorans
LNLSDFFTRYHRF

SEQ ID NO: 1042 - protein, 10 aa, Microcystis aeruginosa
EHLDCELWER

SEQ ID NO: 1043 - protein, 16 aa, Microcystis aeruginosa
IRNATVILEDRMRKLG

SEQ ID NO: 1044 - protein, 8 aa, Microcystis aeruginosa
GIVNLIFG

SEQ ID NO: 1045 - protein, 15 aa, Microcystis aeruginosa
YSGTMKIFRNRYAHR

SEQ ID NO: 1046 - protein, 13 aa, Microcystis aeruginosa
IIVFIDLLLKMLD

SEQ ID NO: 1047 - protein, 11 aa, Vibrio parahaemolyticus
SRNVHPDVLKY

SEQ ID NO: 1048 - protein, 16 aa, Vibrio parahaemolyticus
VFEATKSVADKIRNKT

SEQ ID NO: 1049 - protein, 8 aa, Vibrio parahaemolyticus
VLVDEAFS

SEQ ID NO: 1050 - protein, 15 aa, Vibrio parahaemolyticus
LKGLFGTFRNTTAHA

SEQ ID NO: 1051 - protein, 13 aa, Vibrio parahaemolyticus
ILSMVSLVHRRLD

SEQ ID NO: 1052 - protein, 11 aa, Lactococcus lactis
ALELHSEVTKY

SEQ ID NO: 1053 - protein, 16 aa, Lactococcus lactis
VFESCKGLFDRIRLIS

SEQ ID NO: 1054 - protein, 8 aa, Lactococcus lactis
TLINQAFN

SEQ ID NO: 1055 - protein, 15 aa, Lactococcus lactis
IKTCLYLYRNHQAHV

SEQ ID NO: 1056 - protein, 13 aa, Lactococcus lactis
GLMSISLAHELLD

SEQ ID NO: 1057 - protein, 11 aa, Nematostella vectensis
STTLTTFLNLH

SEQ ID NO: 1058 - protein, 16 aa, Nematostella vectensis
EDYDITLLTCLLRNIC

SEQ ID NO: 1059 - protein, 8 aa, Nematostella vectensis
DKLPPAYD

SEQ ID NO: 1060 - protein, 15 aa, Nematostella vectensis
VVRLRHYRNDLYAHI

SEQ ID NO: 1061 - protein, 13 aa, Nematostella vectensis
WADISAALLSLGG

SEQ ID NO: 1062 - protein, 11 aa, Branchiostoma floridae
PPSLPAQLKKH

SEQ ID NO: 1063 - protein, 16 aa, Branchiostoma floridae
EEFDISLLLLLLKELV

SEQ ID NO: 1064 - protein, 8 aa, Branchiostoma floridae
GRDAPYSD

SEQ ID NO: 1065 - protein, 13 aa, Branchiostoma floridae
KLGQFRNKNYGHI

SEQ ID NO: 1066 - protein, 13 aa, Branchiostoma floridae
WDELTEILVDLGG

SEQ ID NO: 1067 - protein, 11 aa, Homo sapiens
PPLLKKELLIH

SEQ ID NO: 1068 - protein, 16 aa, Homo sapiens
KQFDLCLLLALIKHLN

SEQ ID NO: 1069 - protein, 8 aa, Homo sapiens
NMEPPSSD

SEQ ID NO: 1070 - protein, 15 aa, Homo sapiens
ILRLCKYRDILLSEI

SEQ ID NO: 1071 - protein, 13 aa, Homo sapiens
WKKVSDILLRLGM

SEQ ID NO: 1072 - protein, 11 aa, Escherichia coli
VTAEKLLVSGL

SEQ ID NO: 1073 - protein, 16 aa, Escherichia coli
LYPELRTIEGVLKSKM

SEQ ID NO: 1074 - protein, 8 aa, Escherichia coli
YILKPQFA

SEQ ID NO: 1075 - protein, 14 aa, Escherichia coli
AYTFFNVERHSLFH

SEQ ID NO: 1076 - protein, 13 aa, Escherichia coli
MISDMARLMGKAT

SEQ ID NO: 1077 - protein, 11 aa, Photobacterium profundum
DTYRSLLSSSY

SEQ ID NO: 1078 - protein, 16 aa, Photobacterium profundum
IYPDLRVLEGVIKEAM

SEQ ID NO: 1079 - protein, 8 aa, Photobacterium profundum
TELKTEYN

SEQ ID NO: 1080 - protein, 14 aa, Photobacterium profundum
CYAYFKAHRHSLFH

SEQ ID NO: 1081 - protein, 13 aa, Photobacterium profundum
TTDTIGEVMQMSE

SEQ ID NO: 1082 - protein, 11 aa, Geobacillus thermoglucosidasius
LYDRDRIEASE

SEQ ID NO: 1083 - protein, 16 aa, Geobacillus thermoglucosidasius
VSGTLRAFEGFFKKLL

SEQ ID NO: 1084 - protein, 8 aa, Geobacillus thermoglucosidasius
DISEKVFN

SEQ ID NO: 1085 - protein, 14 aa, Geobacillus thermoglucosidasius
MLNHMSQDRNPYSH

SEQ ID NO: 1086 - protein, 13 aa, Geobacillus thermoglucosidasius
PLRTLNQAISLHN

SEQ ID NO: 1087 - protein, 12 aa, Teredinibacter turnerae
CRSIRKLLNMNA

SEQ ID NO: 1088 - protein, 16 aa, Teredinibacter turnerae
SYPLIYEIENLVRKLI

SEQ ID NO: 1089 - protein, 9 aa, Teredinibacter turnerae
IQLSNFLFD

SEQ ID NO: 1090 - protein, 15 aa, Teredinibacter turnerae
RWGKLYKLRCKIAHN

SEQ ID NO: 1091 - protein, 13 aa, Teredinibacter turnerae
TTKLVEEVKLKIL

SEQ ID NO: 1092 - protein, 5 aa, Methanococcus maripaludis
FRLMY

SEQ ID NO: 1093 - protein, 16 aa, Methanococcus maripaludis
FLDSVLALEIYHTLKF

SEQ ID NO: 1094 - protein, 10 aa, Methanococcus maripaludis
FINKMKDVFN

SEQ ID NO: 1095 - protein, 15 aa, Methanococcus maripaludis
ICRIIRDTRNKLVHD

SEQ ID NO: 1096 - protein, 13 aa, Methanococcus maripaludis
PYFLIELLKNIFK

SEQ ID NO: 1097 - protein, 11 aa, Novosphingobium pentaromativorans
VHRALSWLRRA

SEQ ID NO: 1098 - protein, 14 aa, Novosphingobium pentaromativorans
FILLWIGFNAAYAG

SEQ ID NO: 1099 - protein, 10 aa, Novosphingobium pentaromativorans
ERSRTAINYA

SEQ ID NO: 1100 - protein, 15 aa, Novosphingobium pentaromativorans
LFDRLYVLRNQLVHG

SEQ ID NO: 1101 - protein, 13 aa, Novosphingobium pentaromativorans
RDQVRDGASLLGC

SEQ ID NO: 1102 - protein, 12 aa, Chlorobium chlorochromatii
IMEQRKAILEPL

SEQ ID NO: 1103 - protein, 16 aa, Chlorobium chlorochromatii
AVAYNHFVPLLAQDLI

SEQ ID NO: 1104 - protein, 6 aa, Chlorobium chlorochromatii
KISNKK

SEQ ID NO: 1105 - protein, 15 aa, Chlorobium chlorochromatii
SEKLKTFRDKYYAHL

SEQ ID NO: 1106 - protein, 13 aa, Chlorobium chlorochromatii
FLGIHRKSANEMW

SEQ ID NO: 1107 - protein, 12 aa, Lactococcus lactis
DAYNKLILLKQY

SEQ ID NO: 1108 - protein, 15 aa, Lactococcus lactis
FFYNNLLDSLVIAIF

SEQ ID NO: 1109 - protein, 6 aa, Lactococcus lactis
NYTNFP

SEQ ID NO: 1110 - protein, 15 aa, Lactococcus lactis
LEYLYAQRNKIYVHN

SEQ ID NO: 1111 - protein, 13 aa, Lactococcus lactis
NYAWEPTNINDWE

SEQ ID NO: 1112 - protein, 16 aa, Escherichia coli
ESVIAHMNELLIALSD

SEQ ID NO: 1113 - protein, 15 aa, Escherichia coli
RYTQQQRLRTAIAHH

SEQ ID NO: 1114 - protein, 12 aa, Escherichia coli
EARHEQLTKGGT

SEQ ID NO: 1115 - protein, 16 aa, Cronobacter sakazakii
QHVIAPMNELLIALSD

SEQ ID NO: 1116 - protein, 15 aa, Cronobacter sakazakii
RYDLQQQLRTAIAHH

SEQ ID NO: 1117 - protein, 13 aa, Cronobacter sakazakii
AAERLAELTRGGT

SEQ ID NO: 1118 - protein, 16 aa, Homo sapiens
ESRYRTLRNVGNESDI

SEQ ID NO: 1119 - protein, 10 aa, Homo sapiens
LQPGPSEHSK

SEQ ID NO: 1120 - protein, 14 aa, Homo sapiens
VGDLLKFIRNLGEH

SEQ ID NO: 1121 - protein, 13 aa, Homo sapiens
IGDPSLYFQKTFP

SEQ ID NO: 1122 - protein, 16 aa, Arabidopsis thaliana
EMRLSFLRDASDRVEL

SEQ ID NO: 1123 - protein, 10 aa, Arabidopsis thaliana
MESTAPVAIG

SEQ ID NO: 1124 - protein, 15 aa, Arabidopsis thaliana
IRDLLRVIRNKLNHH

SEQ ID NO: 1125 - protein, 13 aa, Arabidopsis thaliana
PEGFDEYFAVRFP

SEQ ID NO: 1126 - protein, 12 aa, Helicobacter pylori
YELLWQEVIRAK

SEQ ID NO: 1127 - protein, 15 aa, Helicobacter pylori
WVSLQNVMRRIIEYY

SEQ ID NO: 1128 - protein, 5 aa, Helicobacter pylori
FRILG

SEQ ID NO: 1129 - protein, 17 aa, Helicobacter pylori
KQVFSSFISWFNDGSHG

SEQ ID NO: 1130 - protein, 13 aa, Helicobacter pylori
IETYLKVFENIFK

SEQ ID NO: 1131 - protein, 12 aa, Streptococcus mutans
HLMLVDELKKAI

SEQ ID NO: 1132 - protein, 15 aa, Streptococcus mutans
EKYHFNLLRNLLEKT

SEQ ID NO: 1133 - protein, 5 aa, Streptococcus mutans
ATFLG

SEQ ID NO: 1134 - protein, 14 aa, Streptococcus mutans
PAPYIRRINLHSHS

SEQ ID NO: 1135 - protein, 13 aa, Streptococcus mutans
KKVLERVFNQFLQ

SEQ ID NO: 1136 - protein, 12 aa, Escherichia coli
HLHLKQTIEQAI

SEQ ID NO: 1137 - protein, 15 aa, Escherichia coli
ERYHFTLLRNLYEKT

SEQ ID NO: 1138 - protein, 5 aa, Escherichia coli
ASFLG

SEQ ID NO: 1139 - protein, 13 aa, Escherichia coli
LYLSRIINFTSHS

SEQ ID NO: 1140 - protein, 13 aa, Escherichia coli
KATVKLLLDHLKN

SEQ ID NO: 1141 - protein, 12 aa, Bacteroides fragilis
KEIEEERTVQNI

SEQ ID NO: 1142 - protein, 16 aa, Bacteroides fragilis
TSFGEVTEEYHDELYS

SEQ ID NO: 1143 - protein, 8 aa, Bacteroides fragilis
YIKELSNG

SEQ ID NO: 1144 - protein, 15 aa, Bacteroides fragilis
QKTLTEKIRHQIHHP

SEQ ID NO: 1145 - protein, 13 aa, Bacteroides fragilis
ETEIRQSIEDMRA

SEQ ID NO: 1146 - protein, 12 aa, Methylobacillus flagellates
SNQIPTRVSPVL

SEQ ID NO: 1147 - protein, 16 aa, Methylobacillus flagellates
SAFGEASYEYHNELYG

SEQ ID NO: 1148 - protein, 8 aa, Methylobacillus flagellates
YNRLRRDG

SEQ ID NO: 1149 - protein, 15 aa, Methylobacillus flagellates
QVILTEYIRHQIHHP

SEQ ID NO: 1150 - protein, 13 aa, Methylobacillus flagellates
TAELTESIETMRL

SEQ ID NO: 1151 - protein, 12 aa, Campylobacter hominis
KDGEQKKEVKNV

SEQ ID NO: 1152 - protein, 16 aa, Campylobacter hominis
MAFGEITEEYHNELYG

SEQ ID NO: 1153 - protein, 8 aa, Campylobacter hominis
YKKLKKDG

SEQ ID NO: 1154 - protein, 15 aa, Campylobacter hominis
KLTLTEYIRHQIHHP

SEQ ID NO: 1155 - protein, 13 aa, Campylobacter hominis
LSELKDSIEMMRN

SEQ ID NO: 1156 - protein, 15 aa, Homo sapiens
IPDWIVDLRHELTHK

SEQ ID NO: 1157 - protein, 15 aa, Mycobacterium tuberculosis
LGRFESRVRNTAAHE

SEQ ID NO: 1158 - protein, 15 aa, Lactococcus lactis
WIRAGWFIRNRSAHY

SEQ ID NO: 1159 - protein, 15 aa, Thermus thermophilus
  MOD_RES (5)..(5): Any amino acid
LALGXVDDRSLTVHT

SEQ ID NO: 1160 - protein, 22 aa, Unknown
  source: /note="Description of Unknown: Lachnospiraceae bacterium sequence"
LKSMLYSMRNSSFHFSTENVDN

SEQ ID NO: 1161 - protein, 22 aa, Unknown
  source: /note="Description of Unknown: Lachnospiraceae bacterium sequence"
LKDVIYSMRNDSFHYATENHNN

SEQ ID NO: 1162 - protein, 22 aa, Clostridium aminophilum
LRKAIYSLRNETFHFTTLNKGS

SEQ ID NO: 1163 - protein, 22 aa, Unknown
  source: /note="Description of Unknown: Lachnospiraceae bacterium sequence"
IIQIIYSLRNKSFHFKTYDHGD

SEQ ID NO: 1164 - protein, 22 aa, Carnobacterium gallinarum
LRGSVQQIRNEIFHSFDKNQKF

SEQ ID NO: 1165 - protein, 21 aa, Carnobacterium gallinarum
IRGAVQRVRNQIFHQQINKRH

SEQ ID NO: 1166 - protein, 20 aa, Paludibacter propionicigenes
IRGAVQQIRNNVNHYKKDAL

SEQ ID NO: 1167 - protein, 20 aa, Listeria seeligeri
LRGAIAPIRNEIIHLKKHSW

SEQ ID NO: 1168 - protein, 20 aa, Listeria weihenstephanensis
IRGSIQQIRNEVYHCKKHSW

SEQ ID NO: 1169 - protein, 20 aa, Listeria newyorkensis
IRGSIQQIRNEVYHCKKHSW

SEQ ID NO: 1170 - protein, 21 aa, Leptotrichia wadei
ISYSIYNVRNGVGHFNKLILG

SEQ ID NO: 1171 - protein, 21 aa, Leptotrichia wadei
MLNAITSIRHRVVHYNMNTNS

SEQ ID NO: 1172 - protein, 21 aa, Leptotrichia wadei
IDEAISSIRHGIVHFNLELEG

SEQ ID NO: 1173 - protein, 22 aa, Rhodobacter capsulatus
LLRYLRGCRNQTFHLGARAGFL

SEQ ID NO: 1174 - protein, 21 aa, Leptotrichia buccalis
IDEAISSIRHGIVHFNLELEG

SEQ ID NO: 1175 - protein, 21 aa, Leptotrichia sp.
IDEAISSIRHGIVHFNLELEG

SEQ ID NO: 1176 - protein, 16 aa, Leptotrichia sp.
FQKEGYLLRNKILHNS

SEQ ID NO: 1177 - protein, 15 aa, Leptotrichia shahii
FTKIGTNERNRILHA

SEQ ID NO: 1178 - protein, 14 aa, Unknown
  source: /note="Description of Unknown: Lachnospiraceae bacterium sequence"
FRNEIDHFHYFYDR

SEQ ID NO: 1179 - protein, 14 aa, Unknown
  source: /note="Description of Unknown: Lachnospiraceae bacterium sequence"
LRNYIEHFRYYSSF

SEQ ID NO: 1180 - protein, 14 aa, Clostridium aminophilum
VRKYVDHFKYYATS

SEQ ID NO: 1181 - protein, 14 aa, Unknown
  source: /note="Description of Unknown: Lachnospiraceae bacterium sequence"
LRKYVDHFKYYAYG

SEQ ID NO: 1182 - protein, 14 aa, Carnobacterium gallinarum
IRNQTAHLSVLQLE

SEQ ID NO: 1183 - protein, 14 aa, Carnobacterium gallinarum
IRNNIAHLHVLRND

SEQ ID NO: 1184 - protein, 14 aa, Paludibacter propionicigenes
IRNHIAHFNYLTKD

SEQ ID NO: 1185 - protein, 14 aa, Listeria seeligeri
KRNNISHFNYLNGQ

SEQ ID NO: 1186 - protein, 14 aa, Listeria weihenstephanensis
ARNHIAHLNYLSLK

SEQ ID NO: 1187 - protein, 14 aa, Listeria newyorkensis
ARNHIAHLNYLSLK

SEQ ID NO: 1188 - protein, 14 aa, Leptotrichia wadei
FRNYIAHFLHLHTK

SEQ ID NO: 1189 - protein, 14 aa, Leptotrichia wadei
IRNYIAHFNYIPDA

SEQ ID NO: 1190 - protein, 14 aa, Leptotrichia wadei
IRNYIAHFNYIPHA

SEQ ID NO: 1191 - protein, 14 aa, Rhodobacter capsulatus
TRKDLAHFNVLDRA

SEQ ID NO: 1192 - protein, 14 aa, Leptotrichia buccalis
IRNYIAHFNYIPHA

SEQ ID NO: 1193 - protein, 14 aa, Leptotrichia sp.
IRNYIAHFNYIPNA

SEQ ID NO: 1194 - protein, 14 aa, Leptotrichia sp.
IRNYISHFYIVRNP

SEQ ID NO: 1195 - protein, 14 aa, Leptotrichia shahii
IRNYISHFYIVRNP

SEQ ID NO: 1196 - RNA, 36 nt, Artificial Sequence
  source: /note="Description of Artificial Sequence: Synthetic oligonucleotide"
gugccacuucucagaucgcucgcucagugauccgac

SEQ ID NO: 1197 - RNA, 105 nt, Artificial Sequence
  source: /note="Description of Artificial Sequence: Synthetic polynucleotide"
gucagaacacugagcgagcguucuuuuugagaagcucaacgggcuuugccaccuggaaaguggccauuggcacacccguugaaaaaauucuguccucuagacaga

SEQ ID NO: 1198 - RNA, 105 nt, Artificial Sequence; identical to SEQ ID NO: 1197
  source: /note="Description of Artificial Sequence: Synthetic polynucleotide"

SEQ ID NO: 1199 - RNA, 36 nt, Artificial Sequence; identical to SEQ ID NO: 1196
  source: /note="Description of Artificial Sequence: Synthetic oligonucleotide"

SEQ ID NO: 1200 - RNA, 37 nt, Artificial Sequence
  source: /note="Description of Artificial Sequence: Synthetic oligonucleotide"
gugccaaucacccaacacugaccaagcuugccgagac

SEQ ID NO: 1201 - RNA, 64 nt, Artificial Sequence
  source: /note="Description of Artificial Sequence: Synthetic oligonucleotide"
cuuggggaaagcuaggcaaguuuuggaugauaagaaauaaucaugucacaaggagggaguuuuu

SEQ ID NO: 1202 - RNA, 64 nt, Artificial Sequence; identical to SEQ ID NO: 1201
  source: /note="Description of Artificial Sequence: Synthetic oligonucleotide"

SEQ ID NO: 1203 - RNA, 37 nt, Artificial Sequence; identical to SEQ ID NO: 1200
  source: /note="Description of Artificial Sequence: Synthetic oligonucleotide"

SEQ ID NO: 1204 - RNA, 36 nt, Artificial Sequence; identical to SEQ ID NO: 27
  source: /note="Description of Artificial Sequence: Synthetic oligonucleotide"

SEQ ID NO: 1205 - RNA, 75 nt, Artificial Sequence; identical to SEQ ID NO: 28
  source: /note="Description of Artificial Sequence: Synthetic oligonucleotide"

SEQ ID NO: 1206 - RNA, 75 nt, Artificial Sequence; identical to SEQ ID NO: 28
  source: /note="Description of Artificial Sequence: Synthetic oligonucleotide"

SEQ ID NO: 1207 - RNA, 36 nt, Artificial Sequence; identical to SEQ ID NO: 27
  source: /note="Description of Artificial Sequence: Synthetic oligonucleotide"

SEQ ID NO: 1208 - RNA, 36 nt, Artificial Sequence; identical to SEQ ID NO: 30
  source: /note="Description of Artificial Sequence: Synthetic oligonucleotide"

SEQ ID NO: 1209 - RNA, 107 nt, Artificial Sequence; identical to SEQ ID NO: 31
  source: /note="Description of Artificial Sequence: Synthetic polynucleotide"

SEQ ID NO: 1210 - RNA, 107 nt, Artificial Sequence; identical to SEQ ID NO: 31
  source: /note="Description of Artificial Sequence: Synthetic polynucleotide"

SEQ ID NO: 1211 - RNA, 36 nt, Artificial Sequence; identical to SEQ ID NO: 30
  source: /note="Description of Artificial Sequence: Synthetic oligonucleotide"

SEQ ID NO: 1212 - RNA, 36 nt, Artificial Sequence
  source: /note="Description of Artificial Sequence: Synthetic oligonucleotide"
guucgaaagcuuaguggaaagcuucguccuuagcac

SEQ ID NO: 1213 - RNA, 69 nt, Artificial Sequence; identical to SEQ ID NO: 34
  source: /note="Description of Artificial Sequence: Synthetic oligonucleotide"

SEQ ID NO: 1214 - RNA, 69 nt, Artificial Sequence; identical to SEQ ID NO: 34
  source: /note="Description of Artificial Sequence: Synthetic oligonucleotide"

SEQ ID NO: 1215 - RNA, 36 nt, Artificial Sequence; identical to SEQ ID NO: 33
  source: /note="Description of Artificial Sequence: Synthetic oligonucleotide"

SEQ ID NO: 1216 - RNA, 35 nt, Artificial Sequence
  source: /note="Description of Artificial Sequence: Synthetic oligonucleotide"
guauugagaaaagccagauauaguuggcaauagac

SEQ ID NO: 1217 - RNA, 62 nt, Artificial Sequence
  source: /note="Description of Artificial Sequence: Synthetic oligonucleotide"
auauuuugauucccauuuaugguuauuuaccauaaaugggaaucaacuaaaaaauauuuuuu

SEQ ID NO: 1218 - RNA, 35 nt, Artificial Sequence; identical to SEQ ID NO: 1216
  source: /note="Description of Artificial Sequence: Synthetic oligonucleotide"

SEQ ID NO: 1219 - RNA, 62 nt, Artificial Sequence; identical to SEQ ID NO: 1217
  source: /note="Description of Artificial Sequence: Synthetic oligonucleotide"

SEQ ID NO: 1220 - RNA, 35 nt, Artificial Sequence
  source: /note="Description of Artificial Sequence: Synthetic oligonucleotide"
guugaugagaagagcccaagauagagggcaauaac

SEQ ID NO: 1221 - RNA, 35 nt, Artificial Sequence
  source: /note="Description of Artificial Sequence: Synthetic oligonucleotide"
gcuggagaagauagcccaagaaagagggcaauaac

SEQ ID NO: 1222 - RNA, 78 nt, Artificial Sequence
  source: /note="Description of Artificial Sequence: Synthetic oligonucleotide"
auuauuaccauuuugguuggaaugcuauuauaaaggaucauucgauuauuaccucuaccucccuucccacgauuucuu

SEQ ID NO: 1223 - DNA, 78 bp, Artificial Sequence
  source: /note="Description of Artificial Sequence: Synthetic oligonucleotide"
attattaccattttggttggaatgctattataaaggatcattcgattattacctctacctcccttcccacgatttctt

SEQ ID NO: 1224 - RNA, 35 nt, Artificial Sequence; identical to SEQ ID NO: 1220
  source: /note="Description of Artificial Sequence: Synthetic oligonucleotide"

SEQ ID NO: 1225 - DNA, 78 bp, Artificial Sequence; identical to SEQ ID NO: 1223
  source: /note="Description of Artificial Sequence: Synthetic oligonucleotide"

SEQ ID NO: 1226 - RNA, 35 nt, Artificial Sequence; identical to SEQ ID NO: 1221
  source: /note="Description of Artificial Sequence: Synthetic oligonucleotide"

SEQ ID NO: 1227 - RNA, 35 nt, Artificial Sequence
  source: /note="Description of Artificial Sequence: Synthetic oligonucleotide"
guuuggagaacagcccgauauagagggcaauagac

SEQ ID NO: 1228 - RNA, 81 nt, Artificial Sequence
  source: /note="Description of Artificial Sequence: Synthetic oligonucleotide"
gucuuacgaccucaguauuaggaagauuucaaccaagaaaacuuaguuucaggcuuaaugaucgagucaugcagccaaagu

SEQ ID NO: 1229 - RNA, 81 nt, Artificial Sequence; identical to SEQ ID NO: 1228
  source: /note="Description of Artificial Sequence: Synthetic oligonucleotide"

SEQ ID NO: 1230 - RNA, 35 nt, Artificial Sequence; identical to SEQ ID NO: 1227
  source: /note="Description of Artificial Sequence: Synthetic oligonucleotide"

SEQ ID NO: 1231 - RNA, 35 nt, Artificial Sequence; identical to SEQ ID NO: 36
  source: /note="Description of Artificial Sequence: Synthetic oligonucleotide"

SEQ ID NO: 1232 - RNA, 36 nt, Artificial Sequence; identical to SEQ ID NO: 37
  source: /note="Description of Artificial Sequence: Synthetic oligonucleotide"

SEQ ID NO: 1233 - RNA, 36 nt, Artificial Sequence
  source: /note="Description of Artificial Sequence: Synthetic oligonucleotide"
guuauaguccucuuacauuuagagguagucuuuaau

SEQ ID NO: 1234 - RNA, 98 nt, Artificial Sequence
  source: /note="Description of Artificial Sequence: Synthetic oligonucleotide"
ucuuaagaacuucucuaccugaaguuggauuauaaaugacucuugcucucauagauauccuccuuugaaaauauacacugccgauuaauuaccguuuu

SEQ ID NO: 1235 - RNA, 98 nt, Artificial Sequence; identical to SEQ ID NO: 1234
  source: /note="Description of Artificial Sequence: Synthetic oligonucleotide"

SEQ ID NO: 1236 - RNA, 36 nt, Artificial Sequence; identical to SEQ ID NO: 1233
  source: /note="Description of Artificial Sequence: Synthetic oligonucleotide"

SEQ ID NO: 1237 - RNA, 36 nt, Artificial Sequence
  source: /note="Description of Artificial Sequence: Synthetic oligonucleotide"
guuauaguccucuuacauuuagagguaguuuauauu

SEQ ID NO: 1238 - RNA, 36 nt, Artificial Sequence
  source: /note="Description of Artificial Sequence: Synthetic oligonucleotide"
guuauaguccccuuacauuuagggguagucuuuaau

SEQ ID NO: 1239 - RNA, 102 nt, Artificial Sequence
  source: /note="Description of Artificial Sequence: Synthetic polynucleotide"
aauauaaauucucccuaaauauaagagaauaauaacucaaucucuucauucguauuuugucuaguuaagauaaguaccaccaaauacaaucaauccaaaaaa

SEQ ID NO: 1240 - RNA, 102 nt, Artificial Sequence; identical to SEQ ID NO: 1239
  source: /note="Description of Artificial Sequence: Synthetic polynucleotide"

SEQ ID NO: 1241 - RNA, 36 nt, Artificial Sequence; identical to SEQ ID NO: 1237
  source: /note="Description of Artificial Sequence: Synthetic oligonucleotide"

SEQ ID NO: 1242 - RNA, 102 nt, Artificial Sequence; identical to SEQ ID NO: 1239
  source: /note="Description of Artificial Sequence: Synthetic polynucleotide"

SEQ ID NO: 1243 - RNA, 36 nt, Artificial Sequence; identical to SEQ ID NO: 1238
  source: /note="Description of Artificial Sequence: Synthetic oligonucleotide"

SEQ ID NO: 1244 - RNA, 36 nt, Artificial Sequence
  source: /note="Description of Artificial Sequence: Synthetic oligonucleotide"
guuguaguucccuucaauuuugggauaauccacaag

SEQ ID NO: 1245 - RNA, 36 nt, Artificial Sequence; identical to SEQ ID NO: 39
  source: /note="Description of Artificial Sequence: Synthetic oligonucleotide"

SEQ ID NO: 1246 - RNA, 99 nt, Artificial Sequence; identical to SEQ ID NO: 40
  source: /note="Description of Artificial Sequence: Synthetic oligonucleotide"

SEQ ID NO: 1247 - RNA, 99 nt, Artificial Sequence; identical to SEQ ID NO: 40
  source: /note="Description of Artificial Sequence: Synthetic oligonucleotide"

SEQ ID NO: 1248 - RNA, 36 nt, Artificial Sequence; identical to SEQ ID NO: 39
  source: /note="Description of Artificial Sequence: Synthetic oligonucleotide"

SEQ ID NO: 1249 - RNA, 36 nt, Artificial Sequence
  source: /note="Description of Artificial Sequence: Synthetic oligonucleotide"
guuuuagaccucuucuauuuugagguacucuaaauc

SEQ ID NO: 1250 - RNA, 36 nt, Artificial Sequence
  source: /note="Description of Artificial Sequence: Synthetic oligonucleotide"
guuuuaguccucuuuuguuuugagguacucuaaauc

SEQ ID NO: 1251 - RNA, 147 nt, Artificial Sequence
  source: /note="Description of Artificial Sequence: Synthetic polynucleotide"
aagucagcgcacaacaaagaagaugacgaacaaaaucucucgccaucuucuuaaaauuauuugccacacagccaacauuauaagcguuaaaaccagcaccaugaguacauuucacccaacaaucagaauccccguuucuccguuuuu

SEQ ID NO: 1252 - RNA, 36 nt, Artificial Sequence; identical to SEQ ID NO: 1250
  source: /note="Description of Artificial Sequence: Synthetic oligonucleotide"

SEQ ID NO: 1253 - RNA, 147 nt, Artificial Sequence; identical to SEQ ID NO: 1251
  source: /note="Description of Artificial Sequence: Synthetic polynucleotide"

SEQ ID NO: 1254 - RNA, 36 nt, Artificial Sequence
  source: /note="Description of Artificial Sequence: Synthetic oligonucleotide"
guuuuagaucccuucguuuuugggguuaucuauauc

SEQ ID NO: 1255 - RNA, 36 nt, Artificial Sequence; identical to SEQ ID NO: 42
  source: /note="Description of Artificial Sequence: Synthetic oligonucleotide"

SEQ ID NO: 1256 - RNA, 113 nt, Artificial Sequence; identical to SEQ ID NO: 43
  source: /note="Description of Artificial Sequence: Synthetic polynucleotide"

SEQ ID NO: 1257 - RNA, 70 nt, Artificial Sequence; identical to SEQ ID NO: 44
  source: /note="Description of Artificial Sequence: Synthetic oligonucleotide"

SEQ ID NO: 1258 - RNA, 113 nt, Artificial Sequence; identical to SEQ ID NO: 43
  source: /note="Description of Artificial Sequence: Synthetic polynucleotide"

SEQ ID NO: 1259 - RNA, 36 nt, Artificial Sequence; identical to SEQ ID NO: 42
  source: /note="Description of Artificial Sequence: Synthetic oligonucleotide"

SEQ ID NO: 1260 - RNA, 70 nt, Artificial Sequence; identical to SEQ ID NO: 44
  source: /note="Description of Artificial Sequence: Synthetic oligonucleotide"

SEQ ID NO: 1261 - RNA, 36 nt, Artificial Sequence; identical to SEQ ID NO: 42
  source: /note="Description of Artificial Sequence: Synthetic oligonucleotide"

SEQ ID NO: 1262 - RNA, 36 nt, Artificial Sequence; identical to SEQ ID NO: 46
  source: /note="Description of Artificial Sequence: Synthetic oligonucleotide"

SEQ ID NO: 1263 - RNA, 95 nt, Artificial Sequence; identical to SEQ ID NO: 47
  source: /note="Description of Artificial Sequence: Synthetic oligonucleotide"

SEQ ID NO: 1264 - RNA, 95 nt, Artificial Sequence; identical to SEQ ID NO: 47
  source: /note="Description of Artificial Sequence: Synthetic oligonucleotide"

SEQ ID NO: 1265 - RNA, 36 nt, Artificial Sequence; identical to SEQ ID NO: 46
  source: /note="Description of Artificial Sequence: Synthetic oligonucleotide"

SEQ ID NO: 1266 - RNA, 36 nt, Artificial Sequence
  source: /note="Description of Artificial Sequence: Synthetic oligonucleotide"
guucaguccgccgucgucuuggcggugaugugaggc

SEQ ID NO: 1267 - RNA, 36 nt, Artificial Sequence
  source: /note="Description of Artificial Sequence: Synthetic oligonucleotide"
guucaguccgccgucauuuuggcggugaugugcucc

SEQ ID NO: 1268 - RNA, 36 nt, Artificial Sequence; identical to SEQ ID NO: 1266
  source: /note="Description of Artificial Sequence: Synthetic oligonucleotide"

SEQ ID NO: 1269 - RNA, 36 nt, Artificial Sequence; identical to SEQ ID NO: 1267
  source: /note="Description of Artificial Sequence: Synthetic oligonucleotide"

SEQ ID NO: 1270 - RNA, 36 nt, Artificial Sequence; identical to SEQ ID NO: 1266
  source: /note="Description of Artificial Sequence: Synthetic oligonucleotide"

SEQ ID NO: 1271 - RNA, 36 nt, Artificial Sequence; identical to SEQ ID NO: 1267
  source: /note="Description of Artificial Sequence: Synthetic oligonucleotide"

SEQ ID NO: 1272 - DNA, 81 bp, Alicyclobacillus acidoterrestris
agcgcccgctgtcggatcactgagcgagcgatctgagaagtggcactgtttggtaaaggtaaaaagacgaatgatgcatcc

SEQ ID NO: 1273 - DNA, 83 bp, Alicyclobacillus acidoterrestris
tgatgcatccgtcggatcactgagcgagcgatctgagaagtggcaccctttataaaaaggggcgtcctttagtaccgtgtact

SEQ ID NO: 1274 - DNA, 84 bp, Alicyclobacillus acidoterrestris
accgtgtactgtcggatcactgagcgagcgatctgagaagtggcacaagccttgagtaattcgccgtgggattccccgccgtat

SEQ ID NO: 1275 - DNA, 80 bp, Alicyclobacillus acidoterrestris
cccgccgtatgtcggatcactgagcgagcgatctgagaagtggcactaatgaagttaaaggagatgagacaatgaaagaa

SEQ ID NO: 1276 - DNA, 83 bp, Alicyclobacillus acidoterrestris
aatgaaagaagtcggatcactgagcgagcgatctgagaagtggcactgcaatgcgttggattatgacgatgcaggccaaggaa

SEQ ID NO: 1277 - DNA, 56 bp, Alicyclobacillus acidoterrestris
ggccaaggaagtcggatcactgagcgagcgatctgagaagtggcactgatgtcagc

SEQ ID NO: 1278 - DNA, 36 bp, Alicyclobacillus acidoterrestris
gtcggatcactgagcgagcgatctgagaagtggcac

SEQ ID NO: 1279 - DNA, 36 bp, Alicyclobacillus acidoterrestris; identical to SEQ ID NO: 1278

SEQ ID NO: 1280 - DNA, 84 bp, Desulfonatronum thiodismutans
ccggctcgaggtctcggcaagcttggtcagtgttgggtgattggcacatccaggtggttggatgcgggacataccttccgcctt

SEQ ID NO: 1281 - DNA, 84 bp, Desulfonatronum thiodismutans
cttccgccttgtctcggcaagcttggtcagtgttgggtgattggcactgcttcccggcgaacggcgagctgacctcctagatgt

SEQ ID NO: 1282 - DNA, 83 bp, Desulfonatronum thiodismutans
tcctagatgtgtctcggcaagcttggtcagtgttgggtgattggcaccgtctgctcggtctcggacttcaccaccacgtccac

SEQ ID NO: 1283 - DNA, 83 bp, Desulfonatronum thiodismutans
ccacgtccacgtctcggcaagcttggtcagtgttgggtgattggcacgggtgcggcatttgcgggtgttgggggagtggcagg

SEQ ID NO: 1284 - DNA, 37 bp, Desulfonatronum thiodismutans
gtctcggcaagcttggtcagtgttgggtgattggcac

SEQ ID NO: 1285 - DNA, 15 bp, Desulfonatronum thiodismutans
gtctcggcaagcttg

SEQ ID NO: 1286 - DNA, 22 bp, Desulfonatronum thiodismutans
gtcagtgttgggtgattggcac

SEQ ID NO: 1287 - DNA, 80 bp, Unknown
  source: /note="Description of Unknown: Opitutaceae bacterium sequence"
acatccactgccgcctgacgattcgtgaaacggcattcgctgcggcaatagtctctggaaatgttatagtagctcctaca

SEQ ID NO: 1288 - DNA, 81 bp, Unknown
  source: /note="Description of Unknown: Opitutaceae bacterium sequence"
agctcctacaccgcctgacgattcgtgaaacggcattcgctgcggcaagaaaaagagtcgtggtgttggcgcgggtcagac

SEQ ID NO: 1289 - DNA, 80 bp, Unknown
  source: /note="Description of Unknown: Opitutaceae bacterium sequence"
cgggtcagacccgcctgacgattcgtgaaacggcattcgctgcggcaatgtaacgcctggagcatggcttgacccgaacc

SEQ ID NO: 1290 - DNA, 82 bp, Unknown
  source: /note="Description of Unknown: Opitutaceae bacterium sequence"
gacccgaaccccgcctgacgattcgtgaaacggcattcgctgcggcaatatacgtctgattaaaggtatgggattccctgtt

SEQ ID NO: 1291 - DNA, 80 bp, Unknown
  source: /note="Description of Unknown: Opitutaceae bacterium sequence"
attccctgttccgcctgacgattcgtgaaacggcattcgctgcggctctcagtcaattcgaatatgatgcggggtactgg

SEQ ID NO: 1292 - DNA, 80 bp, Unknown
  source: /note="Description of Unknown: Opitutaceae bacterium sequence"
ggggtactggccgcctgacgattcgtgaaacggcattcgctgcggcgctccacaaaagcgattatcatttcccggttata

SEQ ID NO: 1293 - DNA, 82 bp, Unknown
  source: /note="Description of Unknown: Opitutaceae bacterium sequence"
cccggttataccgcctgacgattcgtgaaacggcattcgctgcggcgtgcccggccatgcggttatcggtctcgatggcctt

SEQ ID NO: 1294 - DNA, 79 bp, Unknown
  source: /note="Description of Unknown: Opitutaceae bacterium sequence"
cgatggccttccgcctgacgattcgtgaaacggcattcgctgcggctcgcggggaaacgagtgcgtagtcgatcgtcac

SEQ ID NO: 1295 - DNA, 79 bp, Unknown
  source: /note="Description of Unknown: Opitutaceae bacterium sequence"
cgatcgtcacccgcctgacgattcgtgaaacggcattcgctgcggcgtagctgtcgccgtctttcttgtattctttttt

SEQ ID NO: 1296 - DNA, 82 bp, Unknown
  source: /note="Description of Unknown: Opitutaceae bacterium sequence"
attcttttttccgcctgacgattcgtgaaacggcattcgctgcggcgatcggacaatcacgccagacattgccggtcatgat

SEQ ID NO: 1297 - DNA, 83 bp, Unknown
  source: /note="Description of Unknown: Opitutaceae bacterium sequence"
cggtcatgatccgcctgacgattcgtgaaacggcattcgctgcggcttggcgaccttcaggcgagcgttattggcggcataga

SEQ ID NO: 1298 - DNA, 81 bp, Unknown
  source: /note="Description of Unknown: Opitutaceae bacterium sequence"
gcggcatagaccgcctgacgattcgtgaaacggcattcgctgcggcaaaaatggcgaaaccgaagccgccgacgcgataca

SEQ ID NO: 1299 - DNA, 80 bp, Unknown
  source: /note="Description of Unknown: Opitutaceae bacterium sequence"
acgcgatacaccgcctgacgattcgtgaaacggcattcgctgcggcatgtcaattttggtaacacttcgccttggcacca

SEQ ID NO: 1300 - DNA, 80 bp, Unknown
  source: /note="Description of Unknown: Opitutaceae bacterium sequence"
cttggcaccaccgcctgacgattcgtgaaacggcattcgctgcggcatgtcaattttggtaacacttcgccttggcacca

SEQ ID NO: 1301 - DNA, 80 bp, Unknown
  source: /note="Description of Unknown: Opitutaceae bacterium sequence"
cttggcaccaccgcctgacgattcgtgaaacggcattcgctgcggcagcacgtggggtttttgctctcacaaagtaaatt

SEQ ID NO: 1302 - DNA, 79 bp, Unknown
  source: /note="Description of Unknown: Opitutaceae bacterium sequence"
aaagtaaattccgcctgacgattcgtgaaacggcattcgctgcggcatagcatcggcgagtgtgtctgacagtcctact

SEQ ID NO: 1303 - DNA, 83 bp, Unknown
  source: /note="Description of Unknown: Opitutaceae bacterium sequence"
cagtcctactccgcctgacgattcgtgaaacggcattcgctgcggcggcgaaccctcgtcaaccgcgacctcaagatggcaca

SEQ ID NO: 1304 - DNA, 81 bp, Unknown
  source: /note="Description of Unknown: Opitutaceae bacterium sequence"
agatggcacaccgcctgacgattcgtgaaacggcattcgctgcggcaacgcatcacgcgcctccggctccatttccttgcc

SEQ ID NO: 1305 - DNA, 80 bp, Unknown
  source: /note="Description of Unknown: Opitutaceae bacterium sequence"
tttccttgccccgcctgacgattcgtgaaacggcattcgctgcggctccgctcacaggggcaatctacgctcaggagatg

SEQ ID NO: 1306 - DNA, 81 bp, Unknown
  source: /note="Description of Unknown: Opitutaceae bacterium sequence"
tcaggagatgccgcctgacgattcgtgaaacggcattcgctgcggcgaaaacgccccgaaacacagttcccgaattcaaat

SEQ ID NO: 1307 - DNA, 79 bp, Unknown
  source: /note="Description of Unknown: Opitutaceae bacterium sequence"
gaattcaaatccgcctgacgattcgtgaaacggcattcgctgcggcagcacaattccgagaaacggtttcaggatcata

SEQ ID NO: 1308 - DNA, 81 bp, Unknown
  source: /note="Description of Unknown: Opitutaceae bacterium sequence"
caggatcataccgcctgacgattcgtgaaacggcattcgctgcggcgccagcgttccctgcgatgctgttgcgaaatcccc

SEQ ID NO: 1309 - DNA, 80 bp, Unknown
  source: /note="Description of Unknown: Opitutaceae bacterium sequence"
cgaaatccccccgcctgacgattcgtgaaacggcattcgctgcggcttgcactgcgtggtgaaagagttcaaagcgtcca

SEQ ID NO: 1310 - DNA, 56 bp, Unknown
  source: /note="Description of Unknown: Opitutaceae bacterium sequence"
aaagcgtccaccgcctgacgattcgtgaaacggcattcgctgcggcccgtgctcgc

SEQ ID NO: 1311 - DNA, 36 bp, Unknown
  source: /note="Description of Unknown: Opitutaceae bacterium sequence"
ccgcctgacgattcgtgaaacggcattcgctgcggc

SEQ ID NO: 1312 - DNA, 36 bp, Unknown; identical to SEQ ID NO: 1311
  source: /note="Description of Unknown: Opitutaceae bacterium sequence"

SEQ ID NO: 1313 - DNA, 10 bp, Unknown
  source: /note="Description of Unknown: Opitutaceae bacterium sequence"
ccgcctgacg

SEQ ID NO: 1314 - DNA, 12 bp, Unknown
  source: /note="Description of Unknown: Opitutaceae bacterium sequence"
attcgtgaaacg

SEQ ID NO: 1315 - DNA, 14 bp, Unknown
  source: /note="Description of Unknown: Opitutaceae bacterium sequence"
gcattcgctgcggc

SEQ ID NO: 1316 - DNA, 10 bp, Unknown
  source: /note="Description of Unknown: Opitutaceae bacterium sequence"
ccgcctgacg

SEQ ID NO: 1317 - DNA, 12 bp, Unknown
  source: /note="Description of Unknown: Opitutaceae bacterium sequence"
attcgtgaaacg

SEQ ID NO: 1318 - DNA, 14 bp, Unknown
  source: /note="Description of Unknown: Opitutaceae bacterium sequence"
gcattcgctgcggc

SEQ ID NO: 1319 - DNA, 36 bp, Unknown; identical to SEQ ID NO: 1311
  source: /note="Description of Unknown: Opitutaceae bacterium sequence"

SEQ ID NO: 1320 - DNA, 10 bp, Unknown
  source: /note="Description of Unknown: Opitutaceae bacterium sequence"
ccgcctgacg

SEQ ID NO: 1321 - DNA, 12 bp, Unknown
  source: /note="Description of Unknown: Opitutaceae bacterium sequence"
attcgtgaaacg

SEQ ID NO: 1322 - DNA, 14 bp, Unknown
  source: /note="Description of Unknown: Opitutaceae bacterium sequence"
gcattcgctgcggc

SEQ ID NO: 1323 - DNA, 36 bp, Unknown; identical to SEQ ID NO: 1311
  source: /note="Description of Unknown: Opitutaceae bacterium sequence"

SEQ ID NO: 1324 - DNA, 10 bp, Unknown
  source: /note="Description of Unknown: Opitutaceae bacterium sequence"
ccgcctgacg

SEQ ID NO: 1325 - DNA, 12 bp, Unknown
  source: /note="Description of Unknown: Opitutaceae bacterium sequence"
attcgtgaaacg

SEQ ID NO: 1326 - DNA, 14 bp, Unknown
  source: /note="Description of Unknown: Opitutaceae bacterium sequence"
gcattcgctgcggc

SEQ ID NO: 1327 - DNA, 81 bp, Bacillus thermoamylovorans
accccctgcggtccaagaaaaaagaaatgatacgaggcattagcaccatgcaaacggattgttatataaatcttcttgaac

SEQ ID NO: 1328 - DNA, 82 bp, Bacillus thermoamylovorans
cttcttgaacgtccaagaaaaaagaaatgatacgaggcattagcacattgttccggcggctaatttgtctgcggtaatcgaa

SEQ ID NO: 1329 - DNA, 87 bp, Bacillus thermoamylovorans
ggtaatcgaagtccaagaaaaaagaaatgatacgaggcattagcaccttcgccatcctcatcccttatcagttgattgcctagcgtt

SEQ ID NO: 1330 - DNA, 83 bp, Bacillus thermoamylovorans
gcctagcgttgtccaagaaaaaagaaatgatacgaggcattagcacacacagaaaccaaatgggaacacgttttcgttaataa

SEQ ID NO: 1331 - DNA, 84 bp, Bacillus thermoamylovorans
tcgttaataagtccaagaaaaaagaaatgatacgaggcattagcacgacattaaaaaattccaaccaagcgagttattgagtgg

SEQ ID NO: 1332 - DNA, 80 bp, Bacillus thermoamylovorans
tattgagtgggtccaagaaaaaagaaatgatacgaggcattagcacttatgagcttaaaagcttgttagcgacattaaac

SEQ ID NO: 1333 - DNA, 83 bp, Bacillus thermoamylovorans
gacattaaacgtccaagaaaaaagaaatgatacgaggcattagcacgttttgttacagctttattccttacttgatcgactct

SEQ ID NO: 1334 - DNA, 83 bp, Bacillus thermoamylovorans
gatcgactctgtccaagaaaaaagaaatgatacgaggcattagcaccagaacctatctcaagaggatgcattctggaaaggaa

SEQ ID NO: 1335 - DNA, 86 bp, Bacillus thermoamylovorans
tggaaaggaagtccaagaaaaaagaaatgatacgaggcattagcaccttataacaataatttaaaagcaatttatgactgtataga

SEQ ID NO: 1336 - DNA, 82 bp, Bacillus thermoamylovorans
actgtatagagtccaagaaaaaagaaatgatacgaggcattagcacttttaagggacatcagaaacactataagctcacttg

SEQ ID NO: 1337 - DNA, 81 bp, Bacillus thermoamylovorans
agctcacttggtccaagaaaaaagaaatgatacgaggcattagcacataatcgactttgcatttctatagtgtcgttcatc

SEQ ID NO: 1338 - DNA, 85 bp, Bacillus thermoamylovorans
gtcgttcatcgtccaagaaaaaagaaatgatacgaggcattagcacaaaatggaacaaggaacaatagacgtttataagtatgga

SEQ ID NO: 1339 - DNA, 83 bp, Bacillus thermoamylovorans
taagtatggagtccaagaaaaaagaaatgatacgaggcattagcactttcaataaagcatcaaactctttttgcattttttca

SEQ ID NO: 1340 - DNA, 83 bp, Bacillus thermoamylovorans
cattttttcagtccaagaaaaaagaaatgatacgaggcattagcacaccgagtaaggaatcgtttaatcaacaaacttgaaac

SEQ ID NO: 1341 - DNA, 84 bp, Bacillus thermoamylovorans
aacttgaaacgtccaagaaaaaagaaatgatacgaggcattagcacggtagtcggcggctaagtgtcgcagggttaacaccgat

SEQ ID NO: 1342 - DNA, 85 bp, Bacillus thermoamylovorans
taacaccgatgtccaagaaaaaagaaatgatacgaggcattagcacacgctgaacaaaactcacgaaaccaaaagtttataaaat

SEQ ID NO: 1343 - DNA, 81 bp, Bacillus thermoamylovorans
tttataaaatgtccaagaaaaaagaaatgatacgaggcattagcacggaaaggatttactagatctcgcaagaaaggtaac

SEQ ID NO: 1344 - DNA, 82 bp, Bacillus thermoamylovorans
gaaaggtaacgtccaagaaaaaagaaatgatacgaggcattagcacatttagtatattgttgttttcatttgcttttttcgc

SEQ ID NO: 1345 - DNA, 83 bp, Bacillus thermoamylovorans
cttttttcgcgtccaagaaaaaagaaatgatacgaggcattagcacttataccgtaaaaaattttggatttgatgtcaccgtc

SEQ ID NO: 1346 - DNA, 82 bp, Bacillus thermoamylovorans
tgtcaccgtcgtccaagaaaaaagaaatgatacgaggcattagcacagaacacaaaaagcggaaaaattgcacttattttcg

SEQ ID NO: 1347 - DNA, 82 bp, Bacillus thermoamylovorans
cttattttcggtccaagaaaaaagaaatgatacgaggcattagcacaatactcgtctacaaactttttctgcttttctgtta

SEQ ID NO: 1348 - DNA, 84 bp, Bacillus thermoamylovorans
ttttctgttagtccaagaaaaaagaaatgatacgaggcattagcaccatacaggacacttaaactctactttacgattttcaaa

SEQ ID NO: 1349 - DNA, 82 bp, Bacillus thermoamylovorans
gattttcaaagtccaagaaaaaagaaatgatatgaggcattagcacgatttaaaacttcttctggcatccagtacatagatt

SEQ ID NO: 1350 - DNA, 82 bp, Bacillus thermoamylovorans
tacatagattgtccaagaaaaaagaaatgatatgaggcattagcacgaaaaaactgtttccttatcacacctatagcaataa

SEQ ID NO: 1351 - DNA, 84 bp, Bacillus thermoamylovorans
atagcaataagtccaagaaaaaagaaatgatatgaggcattagcactctagatatgttcaagaaaatatgcagtctatcggtca

SEQ ID NO: 1352 - DNA, 85 bp, Bacillus thermoamylovorans
ctatcggtcagtccaagaaaaaagaaatgatatgaggcattagcacgaatcaattaatccaatttgttgcaacttaggtagagag

SEQ ID NO: 1353 - DNA, 84 bp, Bacillus thermoamylovorans
aggtagagaggtccaagaaaaaagaaatgatatgaggcattagcacccgaattagcatcgtaccaattacatccatatgatgct

SEQ ID NO: 1354 - DNA, 82 bp, Bacillus thermoamylovorans
atatgatgctgtccaagaaaaaagaaatgatatgaggcattagcacttttctatttttatattactgtttgtttggtgataa

SEQ ID NO: 1355 - DNA, 84 bp, Bacillus thermoamylovorans
ttggtgataagtccaagaaaaaagaaatgatatgaggcattagcactgaatctaaccaaggaagaaataaaagatatttataag

SEQ ID NO: 1356 - DNA, 81 bp, Bacillus thermoamylovorans
tatttataaggtccaagaaaaaagaaatgatatgaggcattagcacaaaaaggagtgtttcaaaatggcaaatgaaaaaag

SEQ ID NO: 1357 - DNA, 82 bp, Bacillus thermoamylovorans
atgaaaaaaggtccaagaaaaaagaaatgatatgaggcattagcacagcttggattgaatcaaacaatggtggtcgaggttt

SEQ ID NO: 1358 - DNA, 82 bp, Bacillus thermoamylovorans
gtcgaggtttgtccaagaaaaaagaaatgatatgaggcattagcacttgagttgtaattaatcaccgttctacctgaaaact

SEQ ID NO: 1359 - DNA, 80 bp, Bacillus thermoamylovorans
cctgaaaactgtccaagaaaaaagaaatgatatgaggcattagcactagatgttgaaaacggcggttttgtctattatcc

SEQ ID NO: 1360 - DNA, 84 bp, Bacillus thermoamylovorans
tctattatccgtccaagaaaaaagaaatgatatgaggcattagcacaaacccgcaaaaaataagctgttgacgagtctagttag

SEQ ID NO: 1361 - DNA, 85 bp, Bacillus thermoamylovorans
gtctagttaggtccaagaaaaaagaaatgatacgaggcattagcacttgtcaatcctcgaaaatgccgggcggacgggcttgcca

SEQ ID NO: 1362 - DNA, 81 bp, Bacillus thermoamylovorans
gggcttgccagtccaagaaaaaagaaatgaaacgaggcattagcacccaccaccgacggcgtccacgccaattgcctgctt

SEQ ID NO: 1363 - DNA, 72 bp, Bacillus thermoamylovorans
ttgcctgcttgtccaagaaaaaagaaatgatacgaggcattagcacaacaatataaacgactactttaccgt

SEQ ID NO: 1364 - DNA, 56 bp, Bacillus thermoamylovorans
actttaccgtgttcaagaaaaaagaaatgatatgaggcattagcacgatgggatgg

SEQ ID NO: 1365 - DNA, 36 bp, Bacillus thermoamylovorans
gtccaagaaaaaagaaatgatacgaggcattagcac

SEQ ID NO: 1366 - DNA, 36 bp, Bacillus thermoamylovorans; identical to SEQ ID NO: 1365

SEQ ID NO: 1367 - DNA, 36 bp, Bacillus thermoamylovorans; identical to SEQ ID NO: 1365

SEQ ID NO: 1368 - DNA, 83 bp, Bacillus sp.
ggactttagcgtgctaaccacgaagctttccactaagctttcgaacaccggattggtggaaagacgccgctgccgaccgaaaa

SEQ ID NO: 1369 - DNA, 83 bp, Bacillus sp.
cgaccgaaaagtgctaaccacgaagctttccactaagctttcgaacaccggattggtggaaagacgccgctgccgaccgaaaa

SEQ ID NO: 1370 - DNA, 87 bp, Bacillus sp.
cgaccgaaaagtgctaaccacgaagctttccactaagctttcgaacgggaaaacgtgggcgcaactttgctattctggcatgtttgc

SEQ ID NO: 1371 - DNA, 83 bp, Bacillus sp.
gcatgtttgcgtgctaaccacgaagctttccactaagctttcgaacaagtttggaagggggcgatagcgatgggttttaagat

SEQ ID NO: 1372 - DNA, 81 bp, Bacillus sp.
gttttaagatgtgctaaccacgaagctttccactaagctttcgaacccgatcaccgtcaaaaccgtagtagtaagactcgc

SEQ ID NO: 1373 - DNA, 81 bp, Bacillus sp.
taagactcgcgtgctaaccacgaagctttccactaagctttcgaacaaggcggcctaaatcacttgggccgcccttaagat

SEQ ID NO: 1374 - DNA, 86 bp, Bacillus sp.
cccttaagatgtgctaaccacgaagctttccactaagctttcgaactgcttttatttccatgctaccattggctgaatcgggactg

SEQ ID NO: 1375 - DNA, 82 bp, Bacillus sp.
atcgggactggtgctaaccacgaagctttccactaagctttcgaacaaacaggtatctgcttatcaacgtgcagcacaggcg

SEQ ID NO: 1376 - DNA, 82 bp, Bacillus sp.
agcacaggcggtgctaaccacgaagctttccactaagctttcgaacctatatgagtagaacgtctctcaataagcgtagaat

SEQ ID NO: 1377 - DNA, 81 bp, Bacillus sp.
agcgtagaatgtgctaaccacgaagctttccactaagctttcgaacgcgccttgttgctatcattagggtcgcgatcaaca

SEQ ID NO: 1378 - DNA, 88 bp, Bacillus sp.
gcgatcaacagtgctaaccacgaagctttccactaagctttcgaacgtataacttttagataacaaatgttatacaaaatgcttgacg

SEQ ID NO: 1379 - DNA, 81 bp, Bacillus sp.
atgcttgacggtgctaaccacgaagctttccactaagctttcgaacagcccaagctttacatacacctatgcgtatgcttt

SEQ ID NO: 1380 - DNA, 56 bp, Bacillus sp.
cgtatgctttgtgctaaccacgaagctttccactaagctttcgaactccttcccac

SEQ ID NO: 1381 - DNA, 36 bp, Bacillus sp.
gtgctaaccacgaagctttccactaagctttcgaac

SEQ ID NO: 1382 - DNA, 84 bp, Bacillus sp.
tggacaagctgtgctaaccacgaagctttccactaagctttcgaacctctggtgtaaggcggtttcttgcttgtaagtgcgcgg

SEQ ID NO: 1383 - DNA, 84 bp, Bacillus sp.
aagtgcgcgggtgctaatcccgaagctttccactaagctttcgaacaaaagagtataagtaccactcttagccgagtagttcaa

SEQ ID NO: 1384 - DNA, 80 bp, Bacillus sp.
agtagttcaagtgctaatcccgaagctttccactaagctttcgaacactggagaaccttccaagtgtgcgatagcgtatc

SEQ ID NO: 1385 - DNA, 80 bp, Bacillus sp.
atagcgtatcgtgctaatcccgaagctttccactaagctttcgaacttttttgttccgccaaggtaaaacgtaccgagtt

SEQ ID NO: 1386 - DNA, 83 bp, Bacillus sp.
gtaccgagttgtgctaatcccgaagctttccactaagctttcgaactttccgtaaaactttttgagaaaacaggagggcgact

SEQ ID NO: 1387 - DNA, 86 bp, Bacillus sp.
gagggcgactgtgctaatcccgaagctttccactaagctttcgaaccaggctttttgtgcataggtcatgcagtaacctaatccgc

SEQ ID NO: 1388 - DNA, 85 bp, Bacillus sp.
cctaatccgcgtgctaatcccgaagctttccactaagctttcgaacgaccatgatctcgaaaagaaaattacgcgtgcatcgcaa

SEQ ID NO: 1389 - DNA, 84 bp, Bacillus sp.
tgcatcgcaagtgctaatcccgaagctttccactaagctttcgaactgggccgctccgattcgataaagacgggtatctggaga

SEQ ID NO: 1390 - DNA, 56 bp, Bacillus sp.
tatctggagagtgctaatcccgaagctttccactaagctttcgaaccagggtaccc

SEQ ID NO: 1391 - DNA, 36 bp, Bacillus sp.
gtgctaatcccgaagctttccactaagctttcgaac

SEQ ID NO: 1392 - DNA, 82 bp, Bacillus sp.
gctacctctggtacatccccttcaatttccactaagctttcgaacgttcggcgtagtagtgtacacgctcttgaatatgatg

SEQ ID NO: 1393 - DNA, 81 bp, Bacillus sp.
gaatatgatggtacatccccttcaatttccactaagctttcgaacgccgcaacgtgctccgggagaggcgcacgttcagag

SEQ ID NO: 1394 - DNA, 80 bp, Bacillus sp.
acgttcagaggtacatccccttcaatttccactaagctttcgaacgcgaccagtccgagcagggcaatcccgacaatgcg

SEQ ID NO: 1395 - DNA, 81 bp, Bacillus sp.
cgacaatgcggtacatccccttcaatttccactaagctttcgaacaacccgaaggactacaccatttcccgtgataaagcg

SEQ ID NO: 1396 - DNA, 81 bp, Bacillus sp.
tgataaagcggtacatccccttcaatttccactaagctttcgaacaaaagcttggggagggcttcgagtcgggtatacagg

SEQ ID NO: 1397 - DNA, 79 bp, Bacillus sp.
ggtatacagggtacatccccttcaatttccactaagctttcgaacccttgtccgcgataaatctgtacgtcgaatccgt

SEQ ID NO: 1398 - DNA, 81 bp, Bacillus sp.
tcgaatccgtgtacatccccttcaatttccactaagctttcgaactgtttggttgctgcgcggccgaagttgtctgacagt

SEQ ID NO: 1399 - DNA, 84 bp, Bacillus sp.
gtctgacagtgtacatccccttcaatttccactaagctttcgaacccgttattaagttacctctttctagcataacctgagtgt

SEQ ID NO: 1400 - DNA, 88 bp, Bacillus sp.
acctgagtgtgtacatccccttcaatttccactaagctttcgaacatgtacatcctgcatcagttcgaaggaagcgggatcagctagt

SEQ ID NO: 1401 - DNA, 86 bp, Bacillus sp.
atcagctagtgtacatccccttcaatttccactaagctttcgaaccaagagacgtgttgacgatcatcttttttgagatctgccgt

SEQ ID NO: 1402 - DNA, 87 bp, Bacillus sp.
gatctgccgtgtacatccccttcaatttccactaagctttcgaacgcgcaactcttgcaaagttttttgcagcaacattttttccgt

SEQ ID NO: 1403 - DNA, 82 bp, Bacillus sp.
ttttttccgtgtacatccccttcaatttccactaagctttcgaactcaaccatacttatttattttagcactgccccaaagt

SEQ ID NO: 1404 - DNA, 56 bp, Bacillus sp.
gccccaaagtgtacatccccttcaatttccactaagctttcgaacaacctctgctg

SEQ ID NO: 1405 - DNA, 35 bp, Bacillus sp.
gtacatccccttcaatttccactaagctttcgaac

SEQ ID NO: 1406 - DNA, 36 bp, Bacillus sp.; identical to SEQ ID NO: 1381

SEQ ID NO: 1407 - DNA, 83 bp, Desulfatirhabdium butyrativorans
cccatccatttgtccgtcgatcaagctgctttcaccatcggaaccccggccaccgaggcagccaacaccacccaggccgagct

SEQ ID NO: 1408 - DNA, 83 bp, Desulfatirhabdium butyrativorans
aggccgagctgtgtcagtcgatcaagctgttttcaccatcggaaccccttgaattgagacggttccggagcgcaatatggtga

SEQ ID NO: 1409 - DNA, 59 bp, Desulfatirhabdium butyrativorans
aatatggtgagtgtcagtcgatcaagctgttttcaccatcggaaccccccccggccatc

SEQ ID NO: 1410 - DNA, 38 bp, Desulfatirhabdium butyrativorans
gtgtcagtcgatcaagctgttttcaccatcggaacccc

SEQ ID NO: 1411 - DNA, 38 bp, Desulfatirhabdium butyrativorans; identical to SEQ ID NO: 1410

SEQ ID NO: 1412 - DNA, 19 bp, Desulfatirhabdium butyrativorans
gtgtcagtcgatcaagctg

SEQ ID NO: 1413 - DNA, 19 bp, Desulfatirhabdium butyrativorans
ttttcaccatcggaacccc

SEQ ID NO: 1414 - DNA, 82 bp, Brevibacillus agri
cgaggattttgtgctaaccacgaagctttccactaagctttcgaaccataccgccgtttactttacctggtacggcgactat

SEQ ID NO: 1415 - DNA, 81 bp, Brevibacillus agri
cggcgactatgtgctaaccacgaagctttccactaagctttcgaactctgcaagtgcgcgtctatgaaaagaactgggaaa

SEQ ID NO: 1416 - DNA, 86 bp, Brevibacillus agri
aactgggaaagtgctaaccacgaagctttccactaagctttcgaacgttcaaccttcttcgtgagaaaattgatgatattttgaag

SEQ ID NO: 1417 - DNA, 85 bp, Brevibacillus agri
tattttgaaggtgctaaccacgaagctttccactaagctttcgaaccggatcactctcaacagctccattacaacgatacttatt

SEQ ID NO: 1418 - DNA, 83 bp, Brevibacillus agri
gatacttattgtgctaaccacgaagctttccactaagctttcgaacgaagttatgaagaaagtctagcatgtattcccgatgt

SEQ ID NO: 1419 - DNA, 84 bp, Brevibacillus agri
ttcccgatgtgtgctaaccacgaagctttccactaagctttcgaaccatcaacagcaacatcaacacgagatcgaggttgaggc

SEQ ID NO: 1420 - DNA, 81 bp, Brevibacillus agri
aggttgaggcgtgctaaccacgaagctttccactaagctttcgaacctctgtttgcagcagcatacttcaaaaagtcttca

SEQ ID NO: 1421 - DNA, 85 bp, Brevibacillus agri
aaagtcttcagtgctaaccacgaagctttccactaagctttcgaacataatccgtttgctgtacggatataaaaatcttgtatag

SEQ ID NO: 1422 - DNA, 80 bp, Brevibacillus agri
tcttgtataggtgctaaccacgaagctttccactaagctttcgaaccgtatgcgaagtctgttatacaccgcattttatg

SEQ ID NO: 1423 - DNA, 57 bp, Brevibacillus agri
gcattttatggtgctaaccacgaagctttccactaagctttcgaactccttcccact

SEQ ID NO: 1424 - DNA, 36 bp, Brevibacillus agri; identical to SEQ ID NO: 1381

SEQ ID NO: 1425 - DNA, 87 bp, Brevibacillus agri
tggacaagctgtgctaaccacgaagctttccactaagctttcgaacttcttaacacgcgacgactctttccccacacgatttcgatg

SEQ ID NO: 1426 - DNA, 84 bp, Brevibacillus agri
gatttcgatggtgctaatcccgaagctttccactaagctttcgaacaactataacataacccaagcaaccgcttatagtttctg

SEQ ID NO: 1427 - DNA, 86 bp, Brevibacillus agri
atagtttctggtgctaatcccgaagctttccactaagctttcgaacaccagcgccttgtctgccatgtattgctgtgccaaagcca

SEQ ID NO: 1428 - DNA, 81 bp, Brevibacillus agri
gccaaagccagtgctaatcccgaagctttccactaagctttcgaactaaccgtaagcctgtaacgaagcgttcgctccaac

SEQ ID NO: 1429 - DNA, 81 bp, Brevibacillus agri
tcgctccaacgtgctaatcccgaagctttccactaagctttcgaactgggacggtgcacagcagaccgtaaaagatgcgtt

SEQ ID NO: 1430 - DNA, 82 bp, Brevibacillus agri
aagatgcgttgtgctaatcccgaagctttccactaagctttcgaacatctagtcaccccaaggataattgtcgtcgtagtcc

SEQ ID NO: 1431 - DNA, 84 bp, Brevibacillus agri
gtcgtagtccgtgctaatcccgaagctttccactaagctttcgaacctctagcttgctgtcgaagttagccctactgttgatga

SEQ ID NO: 1432 - DNA, 84 bp, Brevibacillus agri
ctgttgatgagtgctaatcccgaagctttccactaagctttcgaacatctgcatcacgggtagcaacgcccgcagtcaggtctt

SEQ ID NO: 1433 - DNA, 82 bp, Brevibacillus agri
gtcaggtcttgtgctaatcccgaagctttccactaagctttcgaacgaggatcgtgtctgtcaacgggtattgcacgcttcc

SEQ ID NO: 1434 - DNA, 84 bp, Brevibacillus agri
gcacgcttccgtgctaatcccgaagctttccactaagctttcgaacacggagtggattttagagaggggtggtttttgtttcta

SEQ ID NO: 1435 - DNA, 81 bp, Brevibacillus agri
tttgtttctagtgctaatcccgaagctttccactaagctttcgaacattttcgttgcccagacgggagagaggaagagagt

SEQ ID NO: 1436 - DNA, 82 bp, Brevibacillus agri
ggaagagagtgtgctaatcccgaagctttccactaagctttcgaactctcctgatacgccccatcagactgcttttctagca

SEQ ID NO: 1437 - DNA, 83 bp, Brevibacillus agri
ttttctagcagtgctaatcccgaagctttccactaagctttcgaactcatatttatcctgtaagcttccctcactcattttta

SEQ ID NO: 1438 - DNA, 82 bp, Brevibacillus agri
ctcatttttagtgctaatcccgaagctttccactaagctttcgaacttgattgttcggctaaggcgaaggacagagctaagg

SEQ ID NO: 1439 - DNA, 82 bp, Brevibacillus agri
agagctaagggtgctaatcccgaagctttccactaagctttcgaacgtcctgacataccgatgttcggcgctcggtcgaagt

SEQ ID NO: 1440 - DNA, 86 bp, Brevibacillus agri
cggtcgaagtgtgctaatcccgaagctttccactaagctttcgaacgccattcgccgagcctgcggacgtcttcttttccggatac

SEQ ID NO: 1441 - DNA, 81 bp, Brevibacillus agri
ttccggatacgtgctaatcccgaagctttccactaagctttcgaaccccaggaaacttatatcggcaatagtagctgtctg

SEQ ID NO: 1442 - DNA, 82 bp, Brevibacillus agri
tagctgtctggtgctaatcccgaagctttccactaagctttcgaacgtgctgcgagtacgagatcaagcaccgcaaggctaa

SEQ ID NO: 1443 - DNA, 85 bp, Brevibacillus agri
gcaaggctaagtgctaatcccgaagctttccactaagctttcgaacttgccacatttctctacacggggctgcgggtcagcgagc

SEQ ID NO: 1444 - DNA, 86 bp, Brevibacillus agri
gtcagcgagcgtgctaatcccgaagctttccactaagctttcgaacgtaacttgcttactcaaagtaagcgtgtagtcacccgccg

SEQ ID NO: 1445 - DNA, 85 bp, Brevibacillus agri
tcacccgccggtgctaatcccgaagctttccactaagctttcgaacggcacgaattcgacttcgtccgtatgggcgactatatga

SEQ ID NO: 1446 - DNA, 84 bp, Brevibacillus agri
gactatatgagtgctaatcccgaagctttccactaagctttcgaacactatggcaggattggcagaactttcgccgttttttca

SEQ ID NO: 1447 - DNA, 83 bp, Brevibacillus agri
cgttttttcagtgctaatcccgaagctttccactaagctttcgaaccccctttttgaccatgccaagaggaaaagatagcgga

SEQ ID NO: 1448 - DNA, 85 bp, Brevibacillus agri
agatagcggagtgctaatcccgaagctttccactaagctttcgaacttattttgggtctcgtgagtcgatgcagttgcgtatcta

SEQ ID NO: 1449 - DNA, 82 bp, Brevibacillus agri
tgcgtatctagtgctaatcccgaagctttccactaagctttcgaacccacgtggcgaaagcaagttttccatatcgtcataa

SEQ ID NO: 1450 - DNA, 81 bp, Brevibacillus agri
atcgtcataagtgctaatcccgaagctttccactaagctttcgaaccttctattttgggagttggtgctgtgatggtggcg

SEQ ID NO: 1451 - DNA, 82 bp, Brevibacillus agri
gatggtggcggtgctaatcccgaagctttccactaagctttcgaacttctttggtattcactccccatcccgtctcatggct

SEQ ID NO: 1452 - DNA, 83 bp, Brevibacillus agri
tctcatggctgtgctaatcccgaagctttccactaagctttcgaacgctagccgtggacaaggaagaaataaaggaactcatt

SEQ ID NO: 1453 - DNA, 82 bp, Brevibacillus agri
ggaactcattgtgctaatcccgaagctttccactaagctttcgaactaccactacctcaacgctcccgtcgaaaccatcatg

SEQ ID NO: 1454 - DNA, 80 bp, Brevibacillus agri
aaccatcatggtgctaatcccgaagctttccactaagctttcgaactatacaggcccgcttttttgatgtcgatgctgga

SEQ ID NO: 1455 - DNA, 82 bp, Brevibacillus agri
cgatgctggagtgctaatcccgaagctttccactaagctttcgaacggtttcttgatgaaacgcagcgcgtccgtaaaggat

SEQ ID NO: 1456 - DNA, 56 bp, Brevibacillus agri
cgtaaaggatgtgctaatcccgaagctttccactaagctttcgaacccctgtcttc

SEQ ID NO: 1457 - DNA, 36 bp, Brevibacillus agri; identical to SEQ ID NO: 1391

SEQ ID NO: 1458 - DNA, 36 bp, Brevibacillus agri; identical to SEQ ID NO: 1381

SEQ ID NO: 1459 - DNA, 397 bp, Brevibacillus sp.
gtgctaaccacgaagctttccactaagctttcgaacgcttacagcttccggtcaaccccgcatccatccgcatagtgctaatcccgaagctttccactaagctttcgaactcaagatcgaggcactgtacccgggcacgaaagggtgctaatcccgaagctttccactaagctttcgaacttaatatcttggttgtagttgcgcaaaccttttatgtgctaatcccgaagctttccactaagctttcgaaccttactcagtttgcgtcctccgaagaagtcgtccataagtgctaatcccgaagctttccactaagctttcgaacgcgacacgaccgtattcgtggacgagccggtctttgtgtgctaatcccgaagctttccactaagctttcgaa

SEQ ID NO: 1460 - DNA, 36 bp, Brevibacillus sp.; identical to SEQ ID NO: 1381

SEQ ID NO: 1461 - DNA, 80 bp, Methylobacterium nodulans
aacagatcgtgtgccaacgcgatcaggatctggcgcccactgcgaccccccgtgtccacatcgacggccgcgatgcacca

SEQ ID NO: 1462 - DNA, 81 bp, Methylobacterium nodulans
cgatgcaccagtgccaacgcgctcaggatctggcgcccactgcgacttccggcgaccctggatctgcacggctacacaact

SEQ ID NO: 1463 - DNA, 81 bp, Methylobacterium nodulans
ctacacaactgtgccaacgcgctcaggatctggcgcccactgcgacttggccccgccggcaccgggtaggagacccgccat

SEQ ID NO: 1464 - DNA, 79 bp, Methylobacterium nodulans
gacccgccatgtgccaacgcgctcaggatctggcgcccactgcgacatagttctggctgttggaggccagattgttctg

SEQ ID NO: 1465 - DNA, 81 bp, Methylobacterium nodulans
gattgttctggtgccaacgcgctcaggatctggcgcccactgcgacctgaccttcacgcgtgtctactcgggcgtggccaa

SEQ ID NO: 1466 - DNA, 81 bp, Methylobacterium nodulans
gcgtggccaagtgccaacgcgctcaggatctggcgcccactgcgacgtccaggccgagttgggcaaggtccgccggatcct

SEQ ID NO: 1467 - DNA, 56 bp, Methylobacterium nodulans
gccggatcctgtgccaacgcgctcaggatctggcgcccactgcgacggcgggcacg

SEQ ID NO: 1468 - DNA, 36 bp, Methylobacterium nodulans
gtgccaacgcgctcaggatctggcgcccactgcgac

SEQ ID NO: 1469 - DNA, 36 bp, Methylobacterium nodulans; identical to SEQ ID NO: 1468

SEQ ID NO: 1470 - DNA, 12 bp, Methylobacterium nodulans
gtgccaacgcgc

SEQ ID NO: 1471 - DNA, 24 bp, Methylobacterium nodulans
tcaggatctggcgcccactgcgac

SEQ ID NO: 1472 - DNA, 36 bp, Alicyclobacillus acidoterrestris; identical to SEQ ID NO: 1278

SEQ ID NO: 1473 - DNA, 37 bp, Desulfonatronum thiodismutans; identical to SEQ ID NO: 1284

SEQ ID NO: 1474 - DNA, 36 bp, Unknown; identical to SEQ ID NO: 1311
  source: /note="Description of Unknown: Opitutaceae bacterium sequence"

SEQ ID NO: 1475 - DNA, 36 bp, Bacillus thermoamylovorans; identical to SEQ ID NO: 1365

SEQ ID NO: 1476 - DNA, 36 bp, Bacillus sp.; identical to SEQ ID NO: 1381

SEQ ID NO: 1477 - DNA, 38 bp, Desulfatirhabdium butyrativorans; identical to SEQ ID NO: 1410

SEQ ID NO: 1478 - DNA, 36 bp, Brevibacillus agri; identical to SEQ ID NO: 1381

SEQ ID NO: 1479 - DNA, 36 bp, Brevibacillus sp.; identical to SEQ ID NO: 1381

SEQ ID NO: 1480 - DNA, 36 bp, Methylobacterium nodulans; identical to SEQ ID NO: 1468

SEQ ID NO: 1481 - DNA, 36 bp, Alicyclobacillus acidoterrestris; identical to SEQ ID NO: 1278

SEQ ID NO: 1482 - DNA, 37 bp, Desulfonatronum thiodismutans; identical to SEQ ID NO: 1284

SEQ ID NO: 1483 - DNA, 36 bp, Unknown; identical to SEQ ID NO: 1311
  source: /note="Description of Unknown: Opitutaceae bacterium sequence"

SEQ ID NO: 1484 - DNA, 36 bp, Bacillus thermoamylovorans; identical to SEQ ID NO: 1365

SEQ ID NO: 1485 - DNA, 36 bp, Bacillus sp.; identical to SEQ ID NO: 1381

SEQ ID NO: 1486 - DNA, 38 bp, Desulfatirhabdium butyrativorans; identical to SEQ ID NO: 1410

SEQ ID NO: 1487 - DNA, 36 bp, Brevibacillus agri; identical to SEQ ID NO: 1381

SEQ ID NO: 1488 - DNA, 36 bp, Brevibacillus sp.; identical to SEQ ID NO: 1381

SEQ ID NO: 1489 - DNA, 36 bp, Methylobacterium nodulans
gtcgcagtgggcgccagatcctgagcgcgttggcac

SEQ ID NO: 1490 - DNA, 36 bp, Artificial Sequence; identical to SEQ ID NO: 1278
  source: /note="Description of Artificial Sequence: Synthetic oligonucleotide"

SEQ ID NO: 1491 - DNA, 37 bp, Artificial Sequence; identical to SEQ ID NO: 1284
  source: /note="Description of Artificial Sequence: Synthetic oligonucleotide"

SEQ ID NO: 1492 - DNA, 36 bp, Artificial Sequence
  source: /note="Description of Artificial Sequence: Synthetic oligonucleotide"
gccgcagcgaatgccgtttcacgaatcgtcaggcgg

SEQ ID NO: 1493 - DNA, 36 bp, Artificial Sequence; identical to SEQ ID NO: 1365
  source: /note="Description of Artificial Sequence: Synthetic oligonucleotide"

SEQ ID NO: 1494 - DNA, 36 bp, Artificial Sequence
  source: /note="Description of Artificial Sequence: Synthetic oligonucleotide"
gttcgaaagcttagtggaaagcttcgtggttagcac

SEQ ID NO: 1495 - DNA, 37 bp, Artificial Sequence
  source: /note="Description of Artificial Sequence: Synthetic oligonucleotide"
gttcgaaagcttagtggaaattgaaggggatgtacca

SEQ ID NO: 1496 - DNA, 36 bp, Artificial Sequence
  source: /note="Description of Artificial Sequence: Synthetic oligonucleotide"
ggggttccgatggtgaaaacagcttgatcgactgac

SEQ ID NO: 1497 - DNA, 36 bp, Artificial Sequence; identical to SEQ ID NO: 1494
  source: /note="Description of Artificial Sequence: Synthetic oligonucleotide"

SEQ ID NO: 1498 - DNA, 36 bp, Artificial Sequence; identical to SEQ ID NO: 1494
  source: /note="Description of Artificial Sequence: Synthetic oligonucleotide"

SEQ ID NO: 1499 - DNA, 36 bp, Artificial Sequence
  source: /note="Description of Artificial Sequence: Synthetic oligonucleotide"
gtctcaacgggcgccagttcctgagctcgttggcac

SEQ ID NO: 1500 - DNA, 36 bp, Artificial Sequence
  source: /note="Description of Artificial Sequence: Synthetic oligonucleotide"
tgatgtcagcgaaacgaccaccatcggggttataac

SEQ ID NO: 1501 - DNA, 36 bp, Artificial Sequence
  source: /note="Description of Artificial Sequence: Synthetic oligonucleotide"
gggtgcggcatttgcgggtgttgggggagtggcagg

SEQ ID NO: 1502 - DNA, 36 bp, Artificial Sequence
  source: /note="Description of Artificial Sequence: Synthetic oligonucleotide"
cagtggatgtttttccatgaggcgaagaatttcatc

SEQ ID NO: 1503 - DNA, 26 bp, Artificial Sequence
  source: /note="Description of Artificial Sequence: Synthetic oligonucleotide"
aacaatataaacgactactttaccgt

SEQ ID NO: 1504 - DNA, 30 bp, Artificial Sequence
  source: /note="Description of Artificial Sequence: Synthetic oligonucleotide"
agcttgtccaacttgatgctccttttcatc

SEQ ID NO: 1505 - DNA, 36 bp, Artificial Sequence
  source: /note="Description of Artificial Sequence: Synthetic oligonucleotide"
atcatattcaagagcgtgtacactactacgccgaac

SEQ ID NO: 1506 - DNA, 38 bp, Artificial Sequence
  source: /note="Description of Artificial Sequence: Synthetic oligonucleotide"
acagctcggcctgggtggtgttggctgcctcggtggcc

SEQ ID NO: 1507 - DNA, 30 bp, Artificial Sequence; identical to SEQ ID NO: 1504
  source: /note="Description of Artificial Sequence: Synthetic oligonucleotide"

SEQ ID NO: 1508 - DNA, 30 bp, Artificial Sequence; identical to SEQ ID NO: 1504
  source: /note="Description of Artificial Sequence: Synthetic oligonucleotide"

SEQ ID NO: 1509 - DNA, 34 bp, Artificial Sequence
  source: /note="Description of Artificial Sequence: Synthetic oligonucleotide"
tgcatgcgctcctcgaggcggaggatccgatcgc

SEQ ID NO: 1510 - DNA, 200 bp, Artificial Sequence
  source: /note="Description of Artificial Sequence: Synthetic polynucleotide"
gtcggatcactgagtgatctaacctatcaaatgcccaaaccacctcctgcggggttcgaatcccttcgagtgcgccacaaacataagtaaaacgccggattcagtttatcgagtccagcgtttttcttttctactgcagtgttctacgcatcttactatgccgttgtaatacgaagatttgcgaacatcttggaatacag

SEQ ID NO: 1511 - DNA, 200 bp, Artificial Sequence
  source: /note="Description of Artificial Sequence: Synthetic polynucleotide"
gtctcggcaagcttggtcagtgatgggtgattgacatcagtgatgggtgattgacactagaagcgcacggcctaggttacgttcttggggaaagctaggcaagttttggatgataagaaataatcatgtcacaaggagggagtttttgtggcgagaatcaccatgtatcgaattcaaatcaatacagaagctataagaaa

SEQ ID NO: 1512 - DNA, 200 bp, Artificial Sequence
  source: /note="Description of Artificial Sequence: Synthetic polynucleotide"
gccgcagtgaatgccgtttcaccattgatgaagaatgcgaggtgaaaacagagaaattgggtcaactctatcactcttattcagccatcgtttcaagaaaggatacctcgtattggatacaacacagctcgttcgttctctctacctccctcgacaatctcaaggactatggcgatgccagcgatggaacagccgaggca

SEQ ID NO: 1513 - DNA, 200 bp, Artificial Sequence
  source: /note="Description of Artificial Sequence: Synthetic polynucleotide"
gttcaagaaaaaagaaatgatatgaggcattagcacgatgggatgggagagagaggacagttctactcttgctgtatccagcttcttttactttatccggtatcatttcttcacttctttctgcacataaaaaagcacctaactatttggataagttaagtgcttttatttccgtttgaagttgtctattgcttttttct

SEQ ID NO: 1514 - DNA, 200 bp, Artificial Sequence
  source: /note="Description of Artificial Sequence: Synthetic polynucleotide"
gttcgaaaacttggtgaaataccttgaaaattaacacatcaaagatgcccctgctttacgttaggggcatctttctattaaataacctatagtgaacttcaaaatcattgatctcttgataataatatataccaaattcaatagtcatagtgagaggtttacaggtgctcgatacgttttcttgcaaaaaagaagcagtc

SEQ ID NO: 1515 - DNA, 200 bp, Artificial Sequence
  source: /note="Description of Artificial Sequence: Synthetic polynucleotide"
gttcgaaagcttagtggaaattgaaggggatgtaccagaggtagcacttagcaagttttttgagaaacaagtatctggccccaatagctaggcttatgtgaaatgtagcatgagtggtgtgcaatgaaaaaatagggaggatattagcactatgaaaaagcagcttaaaaaaacagttaaatgcgtgatggcgtctatat

SEQ ID NO: 1516 - DNA, 200 bp, Artificial Sequence
  source: /note="Description of Artificial Sequence: Synthetic polynucleotide"
ggggttccgatggtgaaagcagcttgatcgacggacaaatggatgggcatgcgtaggggcggttcgcgaaccgcccctacaactacaccgaaagataccgcgactgaatctcggtgttggccagaagctcctgcctggtgccttcgtagcggatgaggcctttgtcgatgacatagccccgatcggagatggagagggcg

SEQ ID NO: 1517 - DNA, 200 bp, Artificial Sequence; identical to SEQ ID NO: 1514
  source: /note="Description of Artificial Sequence: Synthetic polynucleotide"

SEQ ID NO: 1518 - DNA, 200 bp, Artificial Sequence; identical to SEQ ID NO: 1514
  source: /note="Description of Artificial Sequence: Synthetic polynucleotide"

SEQ ID NO: 1519 - DNA, 200 bp, Artificial Sequence
  source: /note="Description of Artificial Sequence: Synthetic polynucleotide"
gtcgcaacggatcccagatcctgatctcgctggcaggtgccctggtagatgacgactcgcgctcgttgcagggaggctcgcgcagacgagcgggaaactgcttgtcaggcaatcgcctgtgctgggtccgctggattctgtgttcgttggcacgggggagccgtgggaatgcctactgcctggatggggtcgcaccaagt

SEQ ID NO: 1520 - DNA, 37 bp, Artificial Sequence
  source: /note="Description of Artificial Sequence: Synthetic oligonucleotide"
gttcgaaagcttagtggaaattgaaggggatgtaccc

SEQ ID NO: 1521 - RNA, 36 nt, Artificial Sequence
  source: /note="Description of Artificial Sequence: Synthetic oligonucleotide"
gucggaucacugagcgagcgaucugagaaguggcac

SEQ ID NO: 1522 - RNA, 158 nt, Artificial Sequence
  source: /note="Description of Artificial Sequence: Synthetic polynucleotide"
ucuagaggacagaauuuuucaacgggugugccaauggccacuuuccagguggcaaagcccguugagcuucucaaaaagaacgcucgcucaguguucugaccuuucgagcgccuguucagggcgaaaacccugggaggcgcucgaaucauaggugggac

SEQ ID NO: 1523 - RNA, 36 nt, Artificial Sequence; identical to SEQ ID NO: 27
  source: /note="Description of Artificial Sequence: Synthetic oligonucleotide"

SEQ ID NO: 1524 - RNA, 75 nt, Artificial Sequence; identical to SEQ ID NO: 28
  source: /note="Description of Artificial Sequence: Synthetic oligonucleotide"

SEQ ID NO: 1525 - RNA, 36 nt, Artificial Sequence; identical to SEQ ID NO: 30
  source: /note="Description of Artificial Sequence: Synthetic oligonucleotide"

SEQ ID NO: 1526 - RNA, 107 nt, Artificial Sequence; identical to SEQ ID NO: 31
  source: /note="Description of Artificial Sequence: Synthetic polynucleotide"

SEQ ID NO: 1527 - RNA, 36 nt, Artificial Sequence; identical to SEQ ID NO: 1212
  source: /note="Description of Artificial Sequence: Synthetic oligonucleotide"

SEQ ID NO: 1528 - RNA, 69 nt, Artificial Sequence; identical to SEQ ID NO: 34
  source: /note="Description of Artificial Sequence: Synthetic oligonucleotide"

SEQ ID NO: 1529 - DNA, 79 bp, Unknown
  source: /note="Description of Unknown: Lachnospiraceae bacterium sequence"
gaagaaatgactattgccaactatatctggcttttctcaatacccttagcgcgaaaataccccctcgccataaccaacc

SEQ ID NO: 1530 - DNA, 84 bp, Unknown
  source: /note="Description of Unknown: Lachnospiraceae bacterium sequence"
ataaccaaccgtctattgccatctttatctggcttttctcaatactatcaaggtacagcaaatatgctcatcagtgctatgaag

SEQ ID NO: 1531 - DNA, 82 bp, Unknown
  source: /note="Description of Unknown: Lachnospiraceae bacterium sequence"
tgctatgaaggtctattgccatctttatctggcttttctcaatacagtagaaatgattatacctgacaacgttaaagagagt

SEQ ID NO: 1532 - DNA, 79 bp, Unknown
  source: /note="Description of Unknown: Lachnospiraceae bacterium sequence"
taaagagagtgtctattgccatctttatctggcttttctcaatacaaaagaaaccaaaaaattcattgcgtaacaccat

SEQ ID NO: 1533 - DNA, 80 bp, Unknown
  source: /note="Description of Unknown: Lachnospiraceae bacterium sequence"
gtaacaccatgtctattgccaactatatctggcttttctcaatacaaaatacgcacagcctcattaccactcagtttatt

SEQ ID NO: 1534 - DNA, 80 bp, Unknown
  source: /note="Description of Unknown: Lachnospiraceae bacterium sequence"
tcagtttattgtctattgccaactatatctggcttttctcaatactaaaatggatgattggtggctcgatgacactgtcc

SEQ ID NO: 1535 - DNA, 82 bp, Unknown
  source: /note="Description of Unknown: Lachnospiraceae bacterium sequence"
gacactgtccgtctattgccaactatatctggcttttctcaatacagcttctagtggtatgccttcgggaccatcaaaggaa

SEQ ID NO: 1536 - DNA, 81 bp, Unknown
  source: /note="Description of Unknown: Lachnospiraceae bacterium sequence"
atcaaaggaagtctattgccaactatatctggcttttctcaatacgcatatcttgaggattgggattctgaactcttagag

SEQ ID NO: 1537 - DNA, 82 bp, Unknown
  source: /note="Description of Unknown: Lachnospiraceae bacterium sequence"
actcttagaggtctattgccaactatatctggcttttctcaatacctcacttattcacctgggttaactgcatgaactcaac

SEQ ID NO: 1538 - DNA, 55 bp, Unknown
  source: /note="Description of Unknown: Lachnospiraceae bacterium sequence"
tgaactcaacgtctattgccaactttatctggcttttctcaataccctaccttct

SEQ ID NO: 1539 - DNA, 35 bp, Unknown
  source: /note="Description of Unknown: Lachnospiraceae bacterium sequence"
gtctattgccaactatatctggcttttctcaatac

SEQ ID NO: 1540 - DNA, 35 bp, Unknown; identical to SEQ ID NO: 1539
  source: /note="Description of Unknown: Lachnospiraceae bacterium sequence"

SEQ ID NO: 1541 - DNA, 78 bp, Unknown
  source: /note="Description of Unknown: Lachnospiraceae bacterium sequence"
accttccagagttattgccctctatcttggactcttctcatcaactcataataccaagaagaaatcaagcatattatc

SEQ ID NO: 1542 - DNA, 80 bp, Unknown
  source: /note="Description of Unknown: Lachnospiraceae bacterium sequence"
gcatattatcgttattgccctctatcttgggctcttctcatcaacacgagataggcaaaccgaagaacatgatatatata

SEQ ID NO: 1543 - DNA, 78 bp, Unknown
  source: /note="Description of Unknown: Lachnospiraceae bacterium sequence"
gatatatatagttattgccctctatcttgggctcttctcatcaacgaatacgatacaactggcgactggtttgattaa

SEQ ID NO: 1544 - DNA, 55 bp, Unknown
  source: /note="Description of Unknown: Lachnospiraceae bacterium sequence"
gtttgattaagttattgccctctatcttgggctcttctcatcaacaccgtcctct

SEQ ID NO: 1545 - DNA, 35 bp, Unknown
  source: /note="Description of Unknown: Lachnospiraceae bacterium sequence"
gttattgccctctatcttgggctcttctcatcaac

SEQ ID NO: 1546 - DNA, 35 bp, Unknown; identical to SEQ ID NO: 1545
  source: /note="Description of Unknown: Lachnospiraceae bacterium sequence"

SEQ ID NO: 1547 - DNA, 80 bp, Clostridium aminophilum
aaagagcagggtttggagaacagcccgatatagagggcaatagacgccttttgtcgcaagtgttgccgtaccggataacg

SEQ ID NO: 1548 - DNA, 80 bp, Clostridium aminophilum
ccggataacggtttggagaacagcccgatatagagggcaatagacgcaacatatgcttcatcggggaagagttctttccc

SEQ ID NO: 1549 - DNA, 80 bp, Clostridium aminophilum
gttctttcccgtttggagaacagcccgatatagagggcaatagacccggaagcaattcccccaatggcctgtccaagcca

SEQ ID NO: 1550 - DNA, 79 bp, Clostridium aminophilum
gtccaagccagtttggagaacagcccgatatagagggcaatagacttaattgccggatacttgagatggaacttgtcac

SEQ ID NO: 1551 - DNA, 78 bp, Clostridium aminophilum
aacttgtcacgtttggagaacagcccgatatagagggcaatagacatatcatcatcaagagtctgccttgcatcacaa

SEQ ID NO: 1552 - DNA, 79 bp, Clostridium aminophilum
tgcatcacaagtttggagaacagcccgatatagagggcaatagacgtttatgtaaactcttaacgagtaaccatcttaa

SEQ ID NO: 1553 - DNA, 81 bp, Clostridium aminophilum
accatcttaagtttggagaacagcccgataaagagggcaatagaccagaccataccttttcagacgggatctttaccatct

SEQ ID NO: 1554 - DNA, 79 bp, Clostridium aminophilum
tttaccatctgtttggagaacagcccgataaagagggcaatagacctgatgctgcgaatctgccagaactcttgcgacc

SEQ ID NO: 1555 - DNA, 56 bp, Clostridium aminophilum
tcttgcgaccgtttggagaacagcccgatatagagggcaatagacggtgtacttgt

SEQ ID NO: 1556 - DNA, 35 bp, Clostridium aminophilum
gtttggagaacagcccgatatagagggcaatagac

SEQ ID NO: 1557 - DNA, 35 bp, Clostridium aminophilum; identical to SEQ ID NO: 1556

SEQ ID NO: 1558 - DNA, 81 bp, Unknown
  source: /note="Description of Unknown: Lachnospiraceae bacterium sequence"
agaagacagggttttgagaatagcccgacatagagggcaatagacaacggttttaccattgtcaaactcgcctgctgtcgt

SEQ ID NO: 1559 - DNA, 84 bp, Unknown
  source: /note="Description of Unknown: Lachnospiraceae bacterium sequence"
ctgctgtcgtgttttgagaatagcccgacatagagggcaatagacttttgcttcgtcacggatggacttcacaatggcaacaac

SEQ ID NO: 1560 - DNA, 79 bp, Unknown
  source: /note="Description of Unknown: Lachnospiraceae bacterium sequence"
tggcaacaacgttttgagaatagcccgacatagagggcaatagaccttcataaatccaagatacggatgcatgattacg

SEQ ID NO: 1561 - DNA, 77 bp, Unknown
  source: /note="Description of Unknown: Lachnospiraceae bacterium sequence"
catgattacggttttgagaatagcccgacatagagggcaatagacttttaaagggatgataaggaagccgtatactc

SEQ ID NO: 1562 - DNA, 82 bp, Unknown
  source: /note="Description of Unknown: Lachnospiraceae bacterium sequence"
ccgtatactcgttttgagaatagcccgacatagagggcaatagacctaagctggtttttccatgttgacaccttgcctagtt

SEQ ID NO: 1563 - DNA, 81 bp, Unknown
  source: /note="Description of Unknown: Lachnospiraceae bacterium sequence"
ttgcctagttgttttgagaatagcccgacatagagggcaatagacttcttctcttgtcattcttctacctctaaaatctca

SEQ ID NO: 1564 - DNA, 35 bp, Unknown
  source: /note="Description of Unknown: Lachnospiraceae bacterium sequence"
gttttgagaatagcccgacatagagggcaatagac

SEQ ID NO: 1565 - DNA, 35 bp, Unknown; identical to SEQ ID NO: 1564
  source: /note="Description of Unknown: Lachnospiraceae bacterium sequence"

SEQ ID NO: 1566 - DNA, 35 bp, Unknown; identical to SEQ ID NO: 1564
  source: /note="Description of Unknown: Lachnospiraceae bacterium sequence"

SEQ ID NO: 1567 - DNA, 76 bp, Carnobacterium gallinarum
aaaatggaaagttatagtcctcttacatttagaggtagtctttaattaaaagattacaatgaaggttatccacttc

SEQ ID NO: 1568 - DNA, 76 bp, Carnobacterium gallinarum
tatccacttcgttatagtcctcttacatttagaggtagtctttaatttaactcatgggatatgaattatcatttag

SEQ ID NO: 1569 - DNA, 76 bp, Carnobacterium gallinarum
tatcatttaggttatagtcctcttacatttagaggtagtctttaatgtattaggaacaataaacgactctttttta

SEQ ID NO: 1570 - DNA, 76 bp, Carnobacterium gallinarum
ctcttttttagttatagtcctcttacatttagaggtagtctttaattcaaattaatcgttctctttatatctggga

SEQ ID NO: 1571 - DNA, 76 bp, Carnobacterium gallinarum
atatctgggagttatagtcctcttacatttagaggtagtctttaattgattatatcgaaaatcaaataaatgcgct

SEQ ID NO: 1572 - DNA, 37 bp, Carnobacterium gallinarum
gttatagtcctcttacatttagaggtagtctttaatt

SEQ ID NO: 1573 - DNA, 76 bp, Carnobacterium gallinarum
ccaataaacggttatagtcctcttacatttagaggtagtctttaattctcctttttcatgaatggccgttaaccct

SEQ ID NO: 1574 - DNA, 76 bp, Carnobacterium gallinarum
cgttaaccctgttatagtcctcttacatttagaggtagtctttaattgcgacaatcagtatgattacgatgctgac

SEQ ID NO: 1575 - DNA, 76 bp, Carnobacterium gallinarum
cgatgctgacgttatagtcctcttacatttagaggtagtctttaatttttacataaaaaaaggagggtataatcat

SEQ ID NO: 1576 - DNA, 76 bp, Carnobacterium gallinarum
gtataatcatgttatagtcctcttacatttagaggtagtctttaatttacgccaagaattattaatgttgatgcaa

SEQ ID NO: 1577 - DNA, 76 bp, Carnobacterium gallinarum
gttgatgcaagttatagtcctcttacatttagaggtagtctttaatctttatccatgaattaactcatgcgattgc

SEQ ID NO: 1578 - DNA, 76 bp, Carnobacterium gallinarum
atgcgattgcgttatagtcctcttacatttagaggtagtctttaatagaaatatattaatagcgacttatattaca

SEQ ID NO: 1579 - DNA, 76 bp, Carnobacterium gallinarum
ttatattacagttatagtcctcttacatttagaggtagtctttaatatattggagaaaaaagaaaaagattagtca

SEQ ID NO: 1580 - DNA, 76 bp, Carnobacterium gallinarum
agattagtcagttatagtcctcttacatttagaggtagtctttaattcctctattgtacttaacatcatctactga

SEQ ID NO: 1581 - DNA, 56 bp, Carnobacterium gallinarum
catctactgagttatagtcctcttacatttagaggtagtctttaatacccttctat

SEQ ID NO: 1582 - DNA, 36 bp, Carnobacterium gallinarum
gttatagtcctcttacatttagaggtagtctttaat

SEQ ID NO: 1583 - DNA, 37 bp, Carnobacterium gallinarum; identical to SEQ ID NO: 1572

SEQ ID NO: 1584 - DNA, 76 bp, Carnobacterium gallinarum
tctagttctgattaaagactacccctaaatgtaaggggactataactcctcaatgcttttattttgagcgttcgct

SEQ ID NO: 1585 - DNA, 76 bp, Carnobacterium gallinarum
agcgttcgctattaaagactacccctaaatgtaaggggactataactaccgactagagaactctttagtcacttga

SEQ ID NO: 1586 - DNA, 76 bp, Carnobacterium gallinarum
agtcacttgaattaaagactacccctaaatgtaaggggactataactgcttttgttaaattgattattgggtcttc

SEQ ID NO: 1587 - DNA, 37 bp, Carnobacterium gallinarum
attaaagactacccctaaatgtaaggggactataact

SEQ ID NO: 1588 - DNA, 76 bp, Carnobacterium gallinarum
gttgaggggtaatataaactacctctaaatgtaagaggactataactttattagttgttcatctgtttttttttaa

SEQ ID NO: 1589 - DNA, 76 bp, Carnobacterium gallinarum
ttttttttaaaatataaactacctctaaatgtaagaggactataacctacaaaaacgactaaaaaagcgtttaaag

SEQ ID NO: 1590 - DNA, 76 bp, Carnobacterium gallinarum
gcgtttaaagaatataaactacctctaaatgtaagaggactataactttggttgtacccctttttgaacatatagg

SEQ ID NO: 1591 - DNA, 76 bp, Carnobacterium gallinarum
aacatataggaatataaactacctctaaatgtaagaggactataactgcgtaatgatgaggtggcagaatcaatgc

SEQ ID NO: 1592 - DNA, 76 bp, Carnobacterium gallinarum
gaatcaatgcaatataaactacctctaaatgtaagaggactataaccataaaaccttgattttcataagatatatc

SEQ ID NO: 1593 - DNA, 76 bp, Carnobacterium gallinarum
aagatatatcaatataaactacctctaaatgtaagaggactataacccaatagtcaattctgttagccagtaggga

SEQ ID NO: 1594 - DNA, 57 bp, Carnobacterium gallinarum
ccagtagggaaatataaactacctctaaatgtaagaggactataactgctatataaa

SEQ ID NO: 1595 - DNA, 36 bp, Carnobacterium gallinarum
aatataaactacctctaaatgtaagaggactataac

SEQ ID NO: 1596 - DNA, 37 bp, Carnobacterium gallinarum; identical to SEQ ID NO: 1587

SEQ ID NO: 1597 - DNA, 75 bp, Paludibacter propionicigenes
gcatgtccttgttttagttcccttcaattttgggataatccacaagtattactgctgcaatgcagattggcgtat

SEQ ID NO: 1598 - DNA, 75 bp, Paludibacter propionicigenes
attggcgtatgttgtagttcccttcaattttgggataatccacaagtattactgctgcaatgcagattggcgtat

SEQ ID NO: 1599 - DNA, 76 bp, Paludibacter propionicigenes
attggcgtatgttgtagttcccttcaattttgggataatccacaaggaaaacgaaaattataacttcaataaattc

SEQ ID NO: 1600 - DNA, 76 bp, Paludibacter propionicigenes
caataaattcgttgtagttccctttaattttgggataatccacaagagtaaaaccgtacaatggagaagataacgt

SEQ ID NO: 1601 - DNA, 76 bp, Paludibacter propionicigenes
aagataacgtgatgtagttcccttcaattttgggatagtccacaagagcggtgcggatttgagcgatgcgaatttg

SEQ ID NO: 1602 - DNA, 76 bp, Paludibacter propionicigenes
tgcgaatttggttgtagttcccttcaatattgggataatccacaaggaattaggattatgagtttatatagtttga

SEQ ID NO: 1603 - DNA, 76 bp, Paludibacter propionicigenes
tatagtttgagttgtagttcccttcaatattgggataattcacaagtaaacattaaaacaataaacggaagttcga

SEQ ID NO: 1604 - DNA, 76 bp, Paludibacter propionicigenes
ggaagttcgagttgtagttcccttcaattttgggataatccataagaaagcaaaaatgaacacaaaacaatttgaa

SEQ ID NO: 1605 - DNA, 76 bp, Paludibacter propionicigenes
acaatttgaagttttagttcccttcgattttgggataatccacaagtacagcagtaagcggaaacactcaggcaat

SEQ ID NO: 1606 - DNA, 76 bp, Paludibacter propionicigenes
ctcaggcaatgttgtagttcccttcaattttgggataatccacaaggccgtaaaaaatccacacaacgataagatg

SEQ ID NO: 1607 - DNA, 76 bp, Paludibacter propionicigenes
cgataagatggttttagttcccttcaattttgggataatccataagctcttactggctggtgccgggcttgctgca

SEQ ID NO: 1608 - DNA, 76 bp, Paludibacter propionicigenes
gcttgctgcagttgtagttcccttcaattttgggattatccacaagagaaagagtgatgaacgacgagcaggatat

SEQ ID NO: 1609 - DNA, 76 bp, Paludibacter propionicigenes
agcaggatatgttgtagttcccttcaattttgggattatccacaagttacacctgatcaatggaaattgcttagtg

SEQ ID NO: 1610 - DNA, 76 bp, Paludibacter propionicigenes
ttgcttagtggttgtagttcccttcaattttgggataatccacaagtgtgattaatgatattaccgtagctaacgg

SEQ ID NO: 1611 - DNA, 76 bp, Paludibacter propionicigenes
tagctaacgggttgtagttcccttcattattgggatagtccacaagaaaacaacctgcatggataaattatatgac

SEQ ID NO: 1612 - DNA, 76 bp, Paludibacter propionicigenes
attatatgacgttctagctcccttcaattttgggataatccacaagtaaaaacatatttgctgaagactatggaag

SEQ ID NO: 1613 - DNA, 76 bp, Paludibacter propionicigenes
actatggaaggttgtagttcccttcaatattgggataatccacaagtgctattcggaatagatttttaccccacca

SEQ ID NO: 1614 - DNA, 76 bp, Paludibacter propionicigenes
taccccaccagttgtagttcccttcaattttgggataattcacaagtgggattatgaaataaccgattataaacta

SEQ ID NO: 1615 - DNA, 76 bp, Paludibacter propionicigenes
ttataaactagttgtagttcccttcaattttgggataattcacaagagaaatcaaaaattgattcttcagtagctt

SEQ ID NO: 1616 - DNA, 76 bp, Paludibacter propionicigenes
tcagtagcttgttgtagttcccttcaattttgggataattcacaagcgaatcctaatggttatattactgcttcat

SEQ ID NO: 1617 - DNA, 76 bp, Paludibacter propionicigenes
actgcttcatgttgtagttcccttcaattttgggataattcacaagtaaattgaaaatttctggacaagctccagt

SEQ ID NO: 1618 - DNA, 76 bp, Paludibacter propionicigenes
aagctccagtgttgtagttcccttcaatattgggataatccacaagaaacgaatcacagaacatgtgaacctggta

SEQ ID NO: 1619 - DNA, 76 bp, Paludibacter propionicigenes
gaacctggtagttgtagttcccttcaattttgggataatccacaagagatgataacgtaggcaacatccctgataa

SEQ ID NO: 1620 - DNA, 76 bp, Paludibacter propionicigenes
tccctgataagttttagttcccttcaattttgggataatccacaagcgttattcaggagagagtttcaaagagtat

SEQ ID NO: 1621 - DNA, 76 bp, Paludibacter propionicigenes
caaagagtatgttttagttcccttcaatattgggataatccacaagtaaaacattggctaataacagaactagggc

SEQ ID NO: 1622 - DNA, 56 bp, Paludibacter propionicigenes
gaactagggcgttttagttcccttcaatattgggataatccacaagatagtatctg

SEQ ID NO: 1623 - DNA, 36 bp, Paludibacter propionicigenes
gttgtagttcccttcaattttgggataatccacaag

SEQ ID NO: 1624 - DNA, 36 bp, Paludibacter propionicigenes; identical to SEQ ID NO: 1623

SEQ ID NO: 1625 - DNA, 36 bp, Paludibacter propionicigenes; identical to SEQ ID NO: 1623

SEQ ID NO: 1626 - DNA, 36 bp, Paludibacter propionicigenes; identical to SEQ ID NO: 1623

SEQ ID NO: 1627 - DNA, 76 bp, Listeria seeligeri
tgttattgcagtaagagactacctctatatgaaagaggactaaaaccatatttccaaactccactttgactacacc

SEQ ID NO: 1628 - DNA, 76 bp, Listeria seeligeri
tgactacaccgtaagagactacctctatatgaaagaggactaaaacggtcccactacttgaggtacgaacatatca

SEQ ID NO: 1629 - DNA, 76 bp, Listeria seeligeri
gaacatatcagtaagagactacctctatatgaaagaggactaaaacttagtcaacccctcgctgcattttcacatt

SEQ ID NO: 1630 - DNA, 76 bp, Listeria seeligeri
ttttcacattgtaagagactacctctatatgaaagaggactaaaacgatggataatagggatagatcattagtccg

SEQ ID NO: 1631 - DNA, 56 bp, Listeria seeligeri
cattagtccggtaagagactacctctatatgaaagaggactaaaacgtctaatgtg

SEQ ID NO: 1632 - DNA, 36 bp, Listeria seeligeri
gtaagagactacctctatatgaaagaggactaaaac

SEQ ID NO: 1633 - DNA, 36 bp, Listeria seeligeri; identical to SEQ ID NO: 1632

SEQ ID NO: 1634 - DNA, 76 bp, Listeria weihenstephanensis
tattttcatagatttagagtacctcaaaacagaagaggactaaaacgcactctccgacaataatctcgtccatttt

SEQ ID NO: 1635 - DNA, 76 bp, Listeria weihenstephanensis
cgtccattttgatttagagtacctcaaaacaaaagaggactaaaacaactctgtacttgtgaagtacgttaaatcc

SEQ ID NO: 1636 - DNA, 56 bp, Listeria weihenstephanensis
cgttaaatccgatttagagtacctcaaaacaaaagaggactaaaacctcttttgtg

SEQ ID NO: 1637 - DNA, 36 bp, Listeria weihenstephanensis
gatttagagtacctcaaaacaaaagaggactaaaac

SEQ ID NO: 1638 - DNA, 76 bp, Listeria weihenstephanensis
gtctacaagtgatttagagtagctcaaaaaagaagaggtctaaaacagagatactgatactattgagcccagtcat

SEQ ID NO: 1639 - DNA, 76 bp, Listeria weihenstephanensis
gcccagtcatgatttagagtacctcaaaatagaagaggtctaaaactgttccaaggcttgctaactcacctttttc

SEQ ID NO: 1640 - DNA, 76 bp, Listeria weihenstephanensis
cacctttttcgatttagagtacctcaaaatagaagaggtctaaaacatcttgtttatatccgtatcggcacccaaa

SEQ ID NO: 1641 - DNA, 76 bp, Listeria weihenstephanensis
ggcacccaaagatttagagtgcctcaaaatagaagaggtctaaaactcactctccatccactcaatcagatcattt

SEQ ID NO: 1642 - DNA, 76 bp, Listeria weihenstephanensis
cagatcatttgatttagagtacctcaaaatagaagaggtctaaaactatcaatttccttttgatttcttaaatcag

SEQ ID NO: 1643 - DNA, 76 bp, Listeria weihenstephanensis
cttaaatcaggatttagagtacctcaaaatagaagaggtctaaaacgttccaatatggttttttccacatcttccg

SEQ ID NO: 1644 - DNA, 57 bp, Listeria weihenstephanensis
acatcttccggatttagagtacctcaaaatagaagaggtctaaaacctcaaattgaa

SEQ ID NO: 1645 - DNA, 36 bp, Listeria weihenstephanensis
gatttagagtacctcaaaatagaagaggtctaaaac

SEQ ID NO: 1646 - DNA, 36 bp, Listeria weihenstephanensis; identical to SEQ ID NO: 1637

SEQ ID NO: 1647 - DNA, 36 bp, Listeria weihenstephanensis; identical to SEQ ID NO: 1637

SEQ ID NO: 1648 - DNA, 75 bp, Listeria newyorkensis
cgtaatgcttgatttagagtacctcaaaacaaaagaggactaaaactacttgtcgatatggtatagcttttttca

SEQ ID NO: 1649 - DNA, 76 bp, Listeria newyorkensis
gcttttttcagatttagagtacctcaaaacaaaagaggactaaaactaaagcttctaaatggtggcgcgttacgcc

SEQ ID NO: 1650 - DNA, 76 bp, Listeria newyorkensis
gcgttacgccgatttagaatacctcaaaacaaaagaggactaaaacctagcaagccggtcgccgcgctcaaagtaa

SEQ ID NO: 1651 - DNA, 57 bp, Listeria newyorkensis
ctcaaagtaagatttagagtacctcaaaacaaaagaggactaaaacctcttttgtgg

SEQ ID NO: 1652 - DNA, 36 bp, Listeria newyorkensis; identical to SEQ ID NO: 1637

SEQ ID NO: 1653 - DNA, 36 bp, Listeria newyorkensis; identical to SEQ ID NO: 1637

SEQ ID NO: 1654 - DNA, 36 bp, Listeria newyorkensis; identical to SEQ ID NO: 1637

SEQ ID NO: 1655 - DNA, 78 bp, Leptotrichia wadei
atgatgtatgtaagttttagtccccttcgtttttggggtagtctaaatcctggtaaaccaatccacatcgaagaaaag

SEQ ID NO: 1656 - DNA, 76 bp, Leptotrichia wadei
cgaagaaaagaaagttttagtccccttcgtttttggggtagtctaaatcatgtagaagaagttattgtatctattt

SEQ ID NO: 1657 - DNA, 59 bp, Leptotrichia wadei
gtatctattttacgttttagtccccttcgtttttggggtagtctaaatctttatatcaa

SEQ ID NO: 1658 - DNA, 39 bp, Leptotrichia wadei
taagttttagtccccttcgtttttggggtagtctaaatc

SEQ ID NO: 1659 - DNA, 39 bp, Leptotrichia wadei; identical to SEQ ID NO: 1658

SEQ ID NO: 1660 - DNA, 39 bp, Leptotrichia wadei; identical to SEQ ID NO: 1658

SEQ ID NO: 1661 - DNA, 78 bp, Leptotrichia shahii
attctttagagttttagtccccttcgatattggggtggtctatatcgaaaaagaagagtttattcagatagatttgtc

SEQ ID NO: 1662 - DNA, 77 bp, Leptotrichia shahii
tagatttgtcgttttagtccccttcgatattggggtggtctatatcaatatggattacttggtagaacagcaatcta

SEQ ID NO: 1663 - DNA, 57 bp, Leptotrichia shahii
cagcaatctagttttagtccccttcgatattggggtggtctatatcccatcctaatt

SEQ ID NO: 1664 - DNA, 36 bp, Leptotrichia shahii
gttttagtccccttcgatattggggtggtctatatc

SEQ ID NO: 1665 - DNA, 36 bp, Leptotrichia shahii; identical to SEQ ID NO: 1664

SEQ ID NO: 1666 - DNA, 80 bp, Rhodobacter capsulatus
gaacatcatgggttcagtccgccgtcgtcttggcggtgatgtgaggctctcccagcataccaaaccgctggcgaccatca

SEQ ID NO: 1667 - DNA, 78 bp, Rhodobacter capsulatus
gcgaccatcaggttcagtccgccgtcgtcttggcggtgatgtgatgcacaggagagaccgatgaaaatcacggccttc

SEQ ID NO: 1668 - DNA, 79 bp, Rhodobacter capsulatus
cacggccttcggttcagtccgccgtcgtcttggcggtgacgtgaggcacctaaacaagaggttctacgatgccgaaagg

SEQ ID NO: 1669 - DNA, 58 bp, Rhodobacter capsulatus
tgccgaaaggggttcagtccgccgtcgtcttggcggtgatgtgaggctcaggtcccgc

SEQ ID NO: 1670 - DNA, 37 bp, Rhodobacter capsulatus
ggttcagtccgccgtcgtcttggcggtgatgtgaggc

SEQ ID NO: 1671 - DNA, 37 bp, Rhodobacter capsulatus; identical to SEQ ID NO: 1670

SEQ ID NO: 1672 - DNA, 37 bp, Rhodobacter capsulatus; identical to SEQ ID NO: 1670

SEQ ID NO: 1673 - DNA, 37 bp, Rhodobacter capsulatus; identical to SEQ ID NO: 1670

SEQ ID NO: 1674 - DNA, 80 bp, Rhodobacter capsulatus; identical to SEQ ID NO: 1666

SEQ ID NO: 1675 - DNA, 78 bp, Rhodobacter capsulatus
gcgaccatcaggttcagtccgccgtcgtcttggcggtgatgtgatgcacaggagagaccgatgaaaatcaacggcttc

SEQ ID NO: 1676 - DNA, 79 bp, Rhodobacter capsulatus
caacggcttcggttcagtccgccgtcgtcttggcggtgacgtgaggcacctaaacaagaggttctacgatgccgaaagg

SEQ ID NO: 1677 - DNA, 58 bp, Rhodobacter capsulatus; identical to SEQ ID NO: 1669

SEQ ID NO: 1678 - DNA, 37 bp, Rhodobacter capsulatus; identical to SEQ ID NO: 1670

SEQ ID NO: 1679 - DNA, 37 bp, Rhodobacter capsulatus; identical to SEQ ID NO: 1670

SEQ ID NO: 1680 - DNA, 37 bp, Rhodobacter capsulatus; identical to SEQ ID NO: 1670

SEQ ID NO: 1681 - DNA, 37 bp, Rhodobacter capsulatus; identical to SEQ ID NO: 1670

SEQ ID NO: 1682 - DNA, 80 bp, Rhodobacter capsulatus; identical to SEQ ID NO: 1666

SEQ ID NO: 1683 - DNA, 78 bp, Rhodobacter capsulatus; identical to SEQ ID NO: 1675

SEQ ID NO: 1684 - DNA, 79 bp, Rhodobacter capsulatus; identical to SEQ ID NO: 1676

SEQ ID NO: 1685 - DNA, 58 bp, Rhodobacter capsulatus; identical to SEQ ID NO: 1669

SEQ ID NO: 1686 - DNA, 37 bp, Rhodobacter capsulatus; identical to SEQ ID NO: 1670

SEQ ID NO: 1687 - DNA, 37 bp, Rhodobacter capsulatus; identical to SEQ ID NO: 1670

SEQ ID NO: 1688 - DNA, 37 bp, Rhodobacter capsulatus; identical to SEQ ID NO: 1670

SEQ ID NO: 1689 - DNA, 37 bp, Rhodobacter capsulatus; identical to SEQ ID NO: 1670

SEQ ID NO: 1690 - DNA, 35 bp, Unknown; identical to SEQ ID NO: 1539
  source: /note="Description of Unknown: Lachnospiraceae bacterium sequence"

SEQ ID NO: 1691 - DNA, 35 bp, Unknown; identical to SEQ ID NO: 1545
  source: /note="Description of Unknown: Lachnospiraceae bacterium sequence"

SEQ ID NO: 1692 - DNA, 35 bp, Clostridium aminophilum; identical to SEQ ID NO: 1556

SEQ ID NO: 1693 - DNA, 35 bp, Unknown; identical to SEQ ID NO: 1564
  source: /note="Description of Unknown: Lachnospiraceae bacterium sequence"

SEQ ID NO: 1694 - DNA, 37 bp, Carnobacterium gallinarum; identical to SEQ ID NO: 1572

SEQ ID NO: 1695 - DNA, 36 bp, Carnobacterium gallinarum; identical to SEQ ID NO: 1595

SEQ ID NO: 1696 - DNA, 36 bp, Paludibacter propionicigenes; identical to SEQ ID NO: 1623

SEQ ID NO: 1697 - DNA, 36 bp, Listeria seeligeri; identical to SEQ ID NO: 1632

SEQ ID NO: 1698 - DNA, 36 bp, Listeria weihenstephanensis; identical to SEQ ID NO: 1637

SEQ ID NO: 1699 - DNA, 36 bp, Listeria newyorkensis; identical to SEQ ID NO: 1637

SEQ ID NO: 1700 - DNA, 39 bp, Leptotrichia wadei; identical to SEQ ID NO: 1658

SEQ ID NO: 1701 - DNA, 36 bp, Leptotrichia shahii; identical to SEQ ID NO: 1664

SEQ ID NO: 1702 - DNA, 37 bp, Rhodobacter capsulatus; identical to SEQ ID NO: 1670

SEQ ID NO: 1703 - DNA, 37 bp, Rhodobacter capsulatus; identical to SEQ ID NO: 1670

SEQ ID NO: 1704 - DNA, 37 bp, Rhodobacter capsulatus; identical to SEQ ID NO: 1670

SEQ ID NO: 1705 - DNA, 35 bp, Unknown; identical to SEQ ID NO: 1539
  source: /note="Description of Unknown: Lachnospiraceae bacterium sequence"

SEQ ID NO: 1706 - DNA, 35 bp, Unknown; identical to SEQ ID NO: 1545
  source: /note="Description of Unknown: Lachnospiraceae bacterium sequence"

SEQ ID NO: 1707 - DNA, 35 bp, Clostridium aminophilum; identical to SEQ ID NO: 1556

SEQ ID NO: 1708 - DNA, 35 bp, Unknown; identical to SEQ ID NO: 1564
  source: /note="Description of Unknown: Lachnospiraceae bacterium sequence"

SEQ ID NO: 1709 - DNA, 37 bp, Carnobacterium gallinarum; identical to SEQ ID NO: 1572

SEQ ID NO: 1710 - DNA, 36 bp, Carnobacterium gallinarum; identical to SEQ ID NO: 1595

SEQ ID NO: 1711 - DNA, 36 bp, Paludibacter propionicigenes; identical to SEQ ID NO: 1623

SEQ ID NO: 1712 - DNA, 36 bp, Listeria seeligeri; identical to SEQ ID NO: 1632

SEQ ID NO: 1713 - DNA, 36 bp, Listeria weihenstephanensis; identical to SEQ ID NO: 1637

SEQ ID NO: 1714 - DNA, 36 bp, Listeria newyorkensis; identical to SEQ ID NO: 1637

SEQ ID NO: 1715 - DNA, 39 bp, Leptotrichia wadei; identical to SEQ ID NO: 1658

SEQ ID NO: 1716 - DNA, 36 bp, Leptotrichia shahii; identical to SEQ ID NO: 1664

SEQ ID NO: 1717 - DNA, 37 bp, Rhodobacter capsulatus; identical to SEQ ID NO: 1670

SEQ ID NO: 1718 - DNA, 37 bp, Rhodobacter capsulatus; identical to SEQ ID NO: 1670

SEQ ID NO: 1719 - DNA, 37 bp, Rhodobacter capsulatus; identical to SEQ ID NO: 1670

SEQ ID NO: 1720 - DNA, 35 bp, Artificial Sequence
  source: /note="Description of Artificial Sequence: Synthetic oligonucleotide"
gtattgagaaaagccagatatagttggcaatagtc

SEQ ID NO: 1721 - DNA, 36 bp, Artificial Sequence
  source: /note="Description of Artificial Sequence: Synthetic oligonucleotide"
attaaagactacctctaaatgtaagaggactataac

SEQ ID NO: 1722 - DNA, 36 bp, Artificial Sequence; identical to SEQ ID NO: 1582
  source: /note="Description of Artificial Sequence: Synthetic oligonucleotide"

SEQ ID NO: 1723 - DNA, 36 bp, Artificial Sequence; identical to SEQ ID NO: 1721
  source: /note="Description of Artificial Sequence: Synthetic oligonucleotide"

SEQ ID NO: 1724 - DNA, 36 bp, Artificial Sequence
  source: /note="Description of Artificial Sequence: Synthetic oligonucleotide"
gttttagtcctcttctgttttgaggtactctaaatc

SEQ ID NO: 1725 - DNA, 36 bp, Artificial Sequence
  source: /note="Description of Artificial Sequence: Synthetic oligonucleotide"
gttttagccctcttttgttctgaggtactctaaatc

SEQ ID NO: 1726 - DNA, 35 bp, Artificial Sequence; identical to SEQ ID NO: 1564
  source: /note="Description of Artificial Sequence: Synthetic oligonucleotide"

SEQ ID NO: 1727 - DNA, 35 bp, Artificial Sequence; identical to SEQ ID NO: 1556
  source: /note="Description of Artificial Sequence: Synthetic oligonucleotide"

SEQ ID NO: 1728 - DNA, 34 bp, Artificial Sequence
  source: /note="Description of Artificial Sequence: Synthetic oligonucleotide"
tcacatcaccgccaagacgacggcggactgaacc

SEQ ID NO: 1729 - DNA, 34 bp, Artificial Sequence; identical to SEQ ID NO: 1728
  source: /note="Description of Artificial Sequence: Synthetic oligonucleotide"

SEQ ID NO: 1730 - DNA, 34 bp, Artificial Sequence; identical to SEQ ID NO: 1728
  source: /note="Description of Artificial Sequence: Synthetic oligonucleotide"

SEQ ID NO: 1731 - DNA, 35 bp, Artificial Sequence
  source: /note="Description of Artificial Sequence: Synthetic oligonucleotide"
gctggagaagatagcccaagaaagagggcaataac

SEQ ID NO: 1732 - DNA, 36 bp, Artificial Sequence
  source: /note="Description of Artificial Sequence: Synthetic oligonucleotide"
gttttagtcctcttttgttttgaggtactctaaatc

SEQ ID NO: 1733 - DNA, 36 bp, Artificial Sequence
  source: /note="Description of Artificial Sequence: Synthetic oligonucleotide"
gatatagaccaccccaatatcgaaggggactaaaac

SEQ ID NO: 1734 - DNA, 28 bp, Artificial Sequence
  source: /note="Description of Artificial Sequence: Synthetic oligonucleotide"
tggattatcccaaaattgaagggaacta

SEQ ID NO: 1735 - DNA, 36 bp, Artificial Sequence
  source: /note="Description of Artificial Sequence: Synthetic oligonucleotide"
gttttagtcctctttcatatagaggtagtctcttac

SEQ ID NO: 1736 - DNA, 36 bp, Artificial Sequence
  source: /note="Description of Artificial Sequence: Synthetic oligonucleotide"
atttcttctcttgtcattcttctacctttcgcacaa

SEQ ID NO: 1737 - DNA, 30 bp, Artificial Sequence
  source: /note="Description of Artificial Sequence: Synthetic oligonucleotide"
tttccattttcccactactttctaaaaaga

SEQ ID NO: 1738 - DNA, 30 bp, Artificial Sequence
  source: /note="Description of Artificial Sequence: Synthetic oligonucleotide"
tgattatatcgaaaatcaaataaatgcgct

SEQ ID NO: 1739 - DNA, 30 bp, Artificial Sequence
  source: /note="Description of Artificial Sequence: Synthetic oligonucleotide"
cgtttattggtcagagtaaactcaactccg

SEQ ID NO: 1740 - DNA, 30 bp, Artificial Sequence
  source: /note="Description of Artificial Sequence: Synthetic oligonucleotide"
tatgaaaataatgtaacaccaatcgtttgg

SEQ ID NO: 1741 - DNA, 29 bp, Artificial Sequence
  source: /note="Description of Artificial Sequence: Synthetic oligonucleotide"
atattttttgtaacggcttgcaatcattt

SEQ ID NO: 1742 - DNA, 36 bp, Artificial Sequence
  source: /note="Description of Artificial Sequence: Synthetic oligonucleotide"
ttcttctcttgtcattcttctacctctaaaatctca

SEQ ID NO: 1743 - DNA, 35 bp, Artificial Sequence
  source: /note="Description of Artificial Sequence: Synthetic oligonucleotide"
ggtgtacttgttccactcaatccacttatcatctt

SEQ ID NO: 1744 - DNA, 33 bp, Artificial Sequence
  source: /note="Description of Artificial Sequence: Synthetic oligonucleotide"
catgatgttcctttcttgggtatggggtaagcc

SEQ ID NO: 1745 - DNA, 33 bp, Artificial Sequence; identical to SEQ ID NO: 1744
  source: /note="Description of Artificial Sequence: Synthetic oligonucleotide"

SEQ ID NO: 1746 - DNA, 33 bp, Artificial Sequence; identical to SEQ ID NO: 1744
  source: /note="Description of Artificial Sequence: Synthetic oligonucleotide"

SEQ ID NO: 1747 - DNA, 34 bp, Artificial Sequence
  source: /note="Description of Artificial Sequence: Synthetic oligonucleotide"
gctaacatctccggtgttattaccactccattct

SEQ ID NO: 1748 - DNA, 30 bp, Artificial Sequence
  source: /note="Description of Artificial Sequence: Synthetic oligonucleotide"
aagcattacggcgtatcacgccaccaatta

SEQ ID NO: 1749 - DNA, 32 bp, Artificial Sequence
  source: /note="Description of Artificial Sequence: Synthetic oligonucleotide"
tctaaagaattatctattctgtcttttaaatt

SEQ ID NO: 1750 - DNA, 38 bp, Artificial Sequence
  source: /note="Description of Artificial Sequence: Synthetic oligonucleotide"
aaacaaggacatgcacatacccacatgtttttctcttg

SEQ ID NO: 1751 - DNA, 30 bp, Artificial Sequence
  source: /note="Description of Artificial Sequence: Synthetic oligonucleotide"
tgcaataacattttctgatacttttggcgg

SEQ ID NO: 1752 - DNA, 200 bp, Artificial Sequence
  source: /note="Description of Artificial Sequence: Synthetic polynucleotide"
gtattgagaaaagccagatatagcatgaacacttcggtgtttgtgcttttttagtatgacgggcatgccgtcagtctgtggtgaaagtccacaaggggcgtagttgccaacgaaccccaaagcaactcccaaggtttacaccgtgaggtgtaggcgagaagaagggatagcaaaatcgtagcctgacgaacagaaacctg

SEQ ID NO: 1753 - DNA, 200 bp, Artificial Sequence
  source: /note="Description of Artificial Sequence: Synthetic polynucleotide"
attaaagactacctctaaatgtaagaaaaataaaaaaataaaagagttacatatagttaagaaaaagaagtaggaatatttattcctacttctttttcgttgtatttaatttatttatatgaaaatatgataagatagatatatagtattagaatggagggtattgttaagatgcgtataacaaaagtgaaaataaaatt

SEQ ID NO: 1754 - DNA, 200 bp, Artificial Sequence
  source: /note="Description of Artificial Sequence: Synthetic polynucleotide"
gttatagtcctcttacatttagaggttggaatggcaacagtttttttgacaaattttataaggtgcagaacttctttccgtatgctattccgattgtccttgacaatgagcctcctcggatgtgacgatcttcggcaggagctaacagttaaagttagactgcctcgctagcgttagcacatccgagctcattatcaagg

SEQ ID NO: 1755 - DNA, 200 bp, Artificial Sequence
  source: /note="Description of Artificial Sequence: Synthetic polynucleotide"
attaaagactacctggataggctacaattaactagacagaaaaattaaggtgtgtagactagaagaaaacataccaggaggaatttttatgtctaagagaacacgaagaactttttcacaagaattcaagcaacaaatcgtcaatctttacttagctggaaagccacgtgtagaaatcattcgagaatatgaactaacgg

SEQ ID NO: 1756 - DNA, 200 bp, Artificial Sequence
  source: /note="Description of Artificial Sequence: Synthetic polynucleotide"
gttttagtcctcttctgttttgaggtaatatatccgcctattcgcttgcaacaacataactataccagattattaatgaatctgcagcttgacagattagcaaaacataattattttttcataaattaagagacagctcagcagccatctcttaaattcaaccaattatcttctgctaacaaaataccttccttcttgaa

SEQ ID NO: 1757 - DNA, 200 bp, Artificial Sequence
  source: /note="Description of Artificial Sequence: Synthetic polynucleotide"
gttttagtcctcttctgttttgaggtattttttaatagcaaaatgaaattgcattctcccatccaatttcattttgaaattaactgcaacattctatatcaaatttctaatagtctctttactataccacaatactcttctgaaacttgatttgtttctatataaccattatcgatttttttctcacctagatgtctcaa

SEQ ID NO: 1758 - DNA, 200 bp, Artificial Sequence
  source: /note="Description of Artificial Sequence: Synthetic polynucleotide"
gttttgagaatagcccgacatagttatagagatgtataaatataaccgataaacattgactaatttgttgaagtcagtgtttatcggttttttgtgtaaatataggagttgttagaatgatactttttgcctaattttggaactttatgaggatataagatagacttgataaaaaggtaaaagaaaggttaaagagcatg

SEQ ID NO: 1759 - DNA, 200 bp, Artificial Sequence
  source: /note="Description of Artificial Sequence: Synthetic polynucleotide"
gtttgtagaacagcctgatatagagggcgataggactttggctgcatgactcgatcattaagcctgaaactaagttttcttgtgttgaaatcttcctaatactgaggtcgtaagaccatcttgattattcacgaatctgtgactctgttctgagaacaatctcatactataaggacaatgttttttgaaatggaggattt

SEQ ID NO: 1760 - DNA, 200 bp, Artificial Sequence
  source: /note="Description of Artificial Sequence: Synthetic polynucleotide"
tcacatcaccgccaagatgacggcgggaacccaatgcaaacggaggtgcggcaacagcaaggttgcaccggctggacttcggcggcagtctggcgcaacggggcgcaggacacggaagatgtggcgggggcaagatggacctgtttttcaaggccacggaatatgagaccctgcaggcctcatggctcaaggtccagcaa

SEQ ID NO: 1761 - DNA, 200 bp, Artificial Sequence; identical to SEQ ID NO: 1760
  source: /note="Description of Artificial Sequence: Synthetic polynucleotide"

SEQ ID NO: 1762 - DNA, 200 bp, Artificial Sequence; identical to SEQ ID NO: 1760
  source: /note="Description of Artificial Sequence: Synthetic polynucleotide"

SEQ ID NO: 1763 - DNA, 200 bp, Artificial Sequence
  source: /note="Description of Artificial Sequence: Synthetic polynucleotide"
gttggagaagagagcccaagatagaggagattgacatttattacaagcggagattaaaacgataactgagaaaaaatgaataacgctgatgaaaacggccggattcttggccgtttttttgtctatttgctaagtgcacaaagattgtgaaataacatctgctactatgtatttatcgaggtacgtaaatctaggtggtg

SEQ ID NO: 1764 - DNA, 200 bp, Artificial Sequence
  source: /note="Description of Artificial Sequence: Synthetic polynucleotide"
gttttagtcctcttttattttgaggtaatatattcacttgcaacaacataactataccagattattaatggatctgcatcttgacagattaccaaaacataattattttttcataaattaagagacaactcagaatacagaattgcctctacatgtctaattttcccactgtcaattcctctgcgcataatatctccacc

SEQ ID NO: 1765 - DNA, 200 bp, Artificial Sequence
  source: /note="Description of Artificial Sequence: Synthetic polynucleotide"
gatatagaccaccccaatatcgaaaagtgatatttaataaaaataacttctgagtgagaataaaatttcaattcttgctcattttttattgttttttgaatatggttgcttggttgttctgaaacgaaaatttttggagatgttttaaatttttaggttgaaaaaaaataagaattatactataataaataattatgcga

SEQ ID NO: 1766 - DNA, 250 bp, Artificial Sequence
  source: /note="Description of Artificial Sequence: Synthetic polynucleotide"
tggattatcccaaaattgaagggtaacactacagctgacatcaaagcacaaacaaccccgaatgaaattcatcattcggggttgtttttataaaggttagcttagctaattgcagtcctacagcaaatcactacttcttcaaacgcaatatctccggattttctgcaataaatttattggcagcttcgtagccctgatgatagatagtgaagtaagagtcgtagctaaactcatgaaaggtttcgatggc

SEQ ID NO: 1767 - DNA, 250 bp, Artificial Sequence
  source: /note="Description of Artificial Sequence: Synthetic polynucleotide"
gttttagtcctctttcatttagaggtatatcgtattcctacttaataatagtaattaaaacaaccaatgtaaaggatataatcaatatatttaaagtttgcacgagaatgcaatcattttattcataaatatcatatcatttataagctctattttccattttctaaggctaataaataaaactgctgtacctatggatctaaggaagacttatgcacacagtacagcaacttttcagcatgatttgtgt

SEQ ID NO: 1768 - RNA, 78 nt, Artificial Sequence; identical to SEQ ID NO: 1222
  source: /note="Description of Artificial Sequence: Synthetic oligonucleotide"

SEQ ID NO: 1769 - RNA, 35 nt, Artificial Sequence; identical to SEQ ID NO: 1221
  source: /note="Description of Artificial Sequence: Synthetic oligonucleotide"

SEQ ID NO: 1770 - RNA, 81 nt, Artificial Sequence; identical to SEQ ID NO: 1228
  source: /note="Description of Artificial Sequence: Synthetic oligonucleotide"

SEQ ID NO: 1771 - RNA, 35 nt, Artificial Sequence; identical to SEQ ID NO: 1227
  source: /note="Description of Artificial Sequence: Synthetic oligonucleotide"

SEQ ID NO: 1772 - RNA, 99 nt, Artificial Sequence; identical to SEQ ID NO: 40
  source: /note="Description of Artificial Sequence: Synthetic oligonucleotide"

SEQ ID NO: 1773 - RNA, 36 nt, Artificial Sequence; identical to SEQ ID NO: 39
  source: /note="Description of Artificial Sequence: Synthetic oligonucleotide"

SEQ ID NO: 1774 - RNA, 106 nt, Artificial Sequence
  source: /note="Description of Artificial Sequence: Synthetic polynucleotide"
uuaguauaccacaucaauauuaaaucucaaaaaaauaaggagccgucaaacauagcucccuacuucuauuuacucauaauccccaucuauccuuacuuuucguaaa

SEQ ID NO: 1775 - RNA, 36 nt, Artificial Sequence; identical to SEQ ID NO: 46
  source: /note="Description of Artificial Sequence: Synthetic oligonucleotide"

SEQ ID NO: 1776 - DNA, 26 bp, Unknown
  source: /note="Description of Unknown: Gut metagenome sequence"
cccataattgataggatctatgaggt

SEQ ID NO: 1777 - DNA, 17 bp, Unknown
  source: /note="Description of Unknown: Gut metagenome sequence"
ctcccgaaaagccttgt

SEQ ID NO: 1778 - DNA, 26 bp, Unknown
  source: /note="Description of Unknown: Gut metagenome sequence"
cccatgattgataggatctatgaggt

SEQ ID NO: 1779 - DNA, 18 bp, Unknown
  source: /note="Description of Unknown: Gut metagenome sequence"
tttcccccgacaggcgta

SEQ ID NO: 1780 - DNA, 26 bp, Unknown
  source: /note="Description of Unknown: Gut metagenome sequence"
cccataattgataggatctatgaggt

SEQ ID NO: 1781 - DNA, 17 bp, Unknown
  source: /note="Description of Unknown: Gut metagenome sequence"
tccatatgaatggcgcg

SEQ ID NO: 1782 - DNA, 26 bp, Unknown
  source: /note="Description of Unknown: Gut metagenome sequence"
cccataattgataggatctatgaggt

SEQ ID NO: 1783 - DNA, 17 bp, Unknown
  source: /note="Description of Unknown: Gut metagenome sequence"
tgccgccgtcctgcatg

SEQ ID NO: 1784 - DNA, 26 bp, Unknown
  source: /note="Description of Unknown: Gut metagenome sequence"
cccataattgataggatctatgaggt

SEQ ID NO: 1785 - DNA, 17 bp, Unknown
  source: /note="Description of Unknown: Gut metagenome sequence"
gcccggaccacatgcac

SEQ ID NO: 1786 - DNA, 26 bp, Unknown
  source: /note="Description of Unknown: Gut metagenome sequence"
cccataattgataggatctatgaggt

SEQ ID NO: 1787 - DNA, 17 bp, Unknown
  source: /note="Description of Unknown: Gut metagenome sequence"
aaatataaatacattaa

SEQ ID NO: 1788 - DNA, 26 bp, Unknown
  source: /note="Description of Unknown: Gut metagenome sequence"
cccataattgataggatctatgaggt

SEQ ID NO: 1789 - DNA, 17 bp, Unknown
  source: /note="Description of Unknown: Gut metagenome sequence"
atcggttatacaggcta

SEQ ID NO: 1790 - DNA, 26 bp, Unknown
  source: /note="Description of Unknown: Gut metagenome sequence"
cccataattgataggatctatgagga

SEQ ID NO: 1791 - DNA, 17 bp, Unknown
  source: /note="Description of Unknown: Gut metagenome sequence"
acggcgccggaaaacat

SEQ ID NO: 1792 - DNA, 26 bp, Unknown
  source: /note="Description of Unknown: Gut metagenome sequence"
cccataattgataggatctatgaggc

SEQ ID NO: 1793 - DNA, 17 bp, Unknown
  source: /note="Description of Unknown: Gut metagenome sequence"
agagccgcgcctattgg

SEQ ID NO: 1794 - DNA, 26 bp, Unknown
  source: /note="Description of Unknown: Gut metagenome sequence"
cccataattgataggatctatgaggt

SEQ ID NO: 1795 - DNA, 17 bp, Unknown
  source: /note="Description of Unknown: Gut metagenome sequence"
aaaacggtcccactaat

SEQ ID NO: 1796 - DNA, 26 bp, Unknown
  source: /note="Description of Unknown: Gut metagenome sequence"
cccataattgataggatctatgaggt

SEQ ID NO: 1797 - DNA, 17 bp, Unknown
  source: /note="Description of Unknown: Gut metagenome sequence"
aaaacggtcccactaat

SEQ ID NO: 1798 - DNA, 26 bp, Unknown
  source: /note="Description of Unknown: Gut metagenome sequence"
cccataattgataggatctatgaggt

SEQ ID NO: 1799 - DNA, 17 bp, Unknown
  source: /note="Description of Unknown: Gut metagenome sequence"
tgagctgctggcccgca

SEQ ID NO: 1800 - DNA, 26 bp, Unknown
  source: /note="Description of Unknown: Gut metagenome sequence"
cccataattgataggatctatgagga

SEQ ID NO: 1801 - DNA, 17 bp, Unknown
  source: /note="Description of Unknown: Gut metagenome sequence"
tggttccaatgcagtaa

SEQ ID NO: 1802 - DNA, 26 bp, Unknown
  source: /note="Description of Unknown: Gut metagenome sequence"
cccataattgataggatctatgaggt

SEQ ID NO: 1803 - DNA, 17 bp, Unknown
  source: /note="Description of Unknown: Gut metagenome sequence"
acctataacggcaccta

SEQ ID NO: 1804 - DNA, 26 bp, Unknown
  source: /note="Description of Unknown: Gut metagenome sequence"
cccataattgataggatctatgaggc

SEQ ID NO: 1805 - DNA, 26 bp, Unknown
  source: /note="Description of Unknown: Gut metagenome sequence"
cccataattgataggatctatgaggt

SEQ ID NO: 1806 - DNA, 26 bp, Unknown
  source: /note="Description of Unknown: Gut metagenome sequence"
cccataattgataggatctatgaggt

SEQ ID NO: 1807 - DNA, 18 bp, Unknown
  source: /note="Description of Unknown: Gut metagenome sequence"
ttgccgccgtcctgcatg

SEQ ID NO: 1808 - DNA, 27 bp, Unknown
  source: /note="Description of Unknown: Marine metagenome sequence"
cacgtagttttgaagggaagttagagg

SEQ ID NO: 1809 - DNA, 17 bp, Unknown
  source: /note="Description of Unknown: Marine metagenome sequence"
accgaatatgagaactg

SEQ ID NO: 1810 - DNA, 27 bp, Unknown
  source: /note="Description of Unknown: Marine metagenome sequence"
atcgtagttttgaagggaagttagagg

SEQ ID NO: 1811 - DNA, 17 bp, Unknown
  source: /note="Description of Unknown: Marine metagenome sequence"
tacaaataaacatcaag

SEQ ID NO: 1812 - DNA, 26 bp, Unknown
  source: /note="Description of Unknown: Marine metagenome sequence"
tcgtagttttgaagggaagttagagg

SEQ ID NO: 1813 - DNA, 16 bp, Unknown
  source: /note="Description of Unknown: Marine metagenome sequence"
ccgctccggccgtgat

SEQ ID NO: 1814 - DNA, 27 bp, Unknown
  source: /note="Description of Unknown: Marine metagenome sequence"
atcgtagttttgaagggaagttagagg

SEQ ID NO: 1815 - DNA, 27 bp, Unknown
  source: /note="Description of Unknown: Marine metagenome sequence"
atcgtagttttgaagggaagttagagg

SEQ ID NO: 1816 - DNA, 27 bp, Unknown
  source: /note="Description of Unknown: Marine metagenome sequence"
atcgtagttttgaagggaagttagagg

SEQ ID NO: 1817 - DNA, 26 bp, Unknown
  source: /note="Description of Unknown: Marine metagenome sequence"
gttagaattgagaggatgttgaagga

SEQ ID NO: 1818 - DNA, 17 bp, Unknown
  source: /note="Description of Unknown: Marine metagenome sequence"
ttacacggcctatggtc

SEQ ID NO: 1819 - DNA, 26 bp, Unknown
  source: /note="Description of Unknown: Marine metagenome sequence"
gttagaattgagaggatgttgaaggt

SEQ ID NO: 1820 - DNA, 17 bp, Unknown
  source: /note="Description of Unknown: Marine metagenome sequence"
cttatgcacaacccttt

SEQ ID NO: 1821 - DNA, 26 bp, Unknown
  source: /note="Description of Unknown: Marine metagenome sequence"
gttagaattgagaggatgttgaagga

SEQ ID NO: 1822 - DNA, 17 bp, Unknown
  source: /note="Description of Unknown: Marine metagenome sequence"
aactgaacggcttgttt

SEQ ID NO: 1823 - DNA, 26 bp, Unknown
  source: /note="Description of Unknown: Marine metagenome sequence"
gttagaattgagaggatgttgaagga

SEQ ID NO: 1824 - DNA, 17 bp, Unknown
  source: /note="Description of Unknown: Marine metagenome sequence"
tcttactaatttgccga

SEQ ID NO: 1825 - DNA, 26 bp, Unknown
  source: /note="Description of Unknown: Marine metagenome sequence"
gttagaattgagaggatgttgaagga

SEQ ID NO: 1826 - DNA, 26 bp, Unknown
  source: /note="Description of Unknown: Marine metagenome sequence"
gttagaattgagaggatgttgaagga

SEQ ID NO: 1827 - DNA, 26 bp, Unknown
  source: /note="Description of Unknown: Marine metagenome sequence"
gttagaattgagaggatgttgaagga

SEQ ID NO: 1828 - DNA, 17 bp, Unknown
  source: /note="Description of Unknown: Marine metagenome sequence"
aactgaacggcttgttt

SEQ ID NO: 1829 - DNA, 26 bp, Unknown
  source: /note="Description of Unknown: Gut metagenome sequence"
cccataattgataggatctatgaggt

SEQ ID NO: 1830 - DNA, 27 bp, Unknown
  source: /note="Description of Unknown: Marine metagenome sequence"
atcgtagttttgaagggaagttagagg

SEQ ID NO: 1831 - DNA, 26 bp, Unknown
  source: /note="Description of Unknown: Marine metagenome sequence"
gttagaattgagaggatgttgaagga

SEQ ID NO: 1832 - DNA, 26 bp, Unknown
  source: /note="Description of Unknown: Gut metagenome sequence"
cccataattgataggatctatgaggt

SEQ ID NO: 1833 - DNA, 27 bp, Unknown
  source: /note="Description of Unknown: Marine metagenome sequence"
atcgtagttttgaagggaagttagagg

SEQ ID NO: 1834 - DNA, 26 bp, Unknown
  source: /note="Description of Unknown: Marine metagenome sequence"
gttagaattgagaggatgttgaagga

SEQ ID NO: 1835 - DNA, 27 bp, Artificial Sequence
  source: /note="Description of Artificial Sequence: Synthetic oligonucleotide"
cctctaacttcccttcaaaactacgat

SEQ ID NO: 1836 - DNA, 17 bp, Artificial Sequence
  source: /note="Description of Artificial Sequence: Synthetic oligonucleotide"
cagttctcatattcggt

SEQ ID NO: 1837 - DNA, 225 bp, Artificial Sequence
  source: /note="Description of Artificial Sequence: Synthetic polynucleotide"
cctctaacttcccttcaaaactacgtgacaaaggttaacatattgtaattccacttgattttgtcataccagggagaaaattggcatggaaatggatcaatttcagcaccccgattcggtttggacatggaaatctaaccaacggggccgcaaggcaagtctgtggattccctacctcgatcaaataagaaaaattaaggggactcgctgggaatttgtttataa

SEQ ID NO: 1838 - DNA, 37 bp, Artificial Sequence; identical to SEQ ID NO: 1284
  source: /note="Description of Artificial Sequence: Synthetic oligonucleotide"

SEQ ID NO: 1839 - DNA, 36 bp, Artificial Sequence; identical to SEQ ID NO: 1311
  source: /note="Description of Artificial Sequence: Synthetic oligonucleotide"

SEQ ID NO: 1840 - DNA, 35 bp, Artificial Sequence
  source: /note="Description of Artificial Sequence: Synthetic oligonucleotide"
cttcaacgaagccacgccgcgaacggcgtggagtg

SEQ ID NO: 1841 - DNA, 36 bp, Artificial Sequence
  source: /note="Description of Artificial Sequence: Synthetic oligonucleotide"
gcttcaacgaagccacgccgcgaacggcgtggagtg

SEQ ID NO: 1842 - DNA, 36 bp, Artificial Sequence; identical to SEQ ID NO: 1365
  source: /note="Description of Artificial Sequence: Synthetic oligonucleotide"

SEQ ID NO: 1843 - DNA, 36 bp, Artificial Sequence; identical to SEQ ID NO: 1381
  source: /note="Description of Artificial Sequence: Synthetic oligonucleotide"

SEQ ID NO: 1844 - DNA, 36 bp, Artificial Sequence; identical to SEQ ID NO: 1381
  source: /note="Description of Artificial Sequence: Synthetic oligonucleotide"

SEQ ID NO: 1845 - DNA, 36 bp, Artificial Sequence; identical to SEQ ID NO: 1381
  source: /note="Description of Artificial Sequence: Synthetic oligonucleotide"

SEQ ID NO: 1846 - DNA, 38 bp, Artificial Sequence; identical to SEQ ID NO: 1410
  source: /note="Description of Artificial Sequence: Synthetic oligonucleotide"

SEQ ID NO: 1847 - DNA, 36 bp, Artificial Sequence; identical to SEQ ID NO: 1391
  source: /note="Description of Artificial Sequence: Synthetic oligonucleotide"

SEQ ID NO: 1848 - DNA, 36 bp, Artificial Sequence; identical to SEQ ID NO: 1468
  source: /note="Description of Artificial Sequence: Synthetic oligonucleotide"

SEQ ID NO: 1849 - DNA, 28 bp, Artificial Sequence
  source: /note="Description of Artificial Sequence: Synthetic oligonucleotide"
gtttcaatccgcgcccccgtgagggggc

SEQ ID NO: 1850 - DNA, 29 bp, Artificial Sequence
  source: /note="Description of Artificial Sequence: Synthetic oligonucleotide"
cggatcatccccgcatccgcgggggacac

SEQ ID NO: 1851 - DNA, 31 bp, Artificial Sequence
  source: /note="Description of Artificial Sequence: Synthetic oligonucleotide"
gtttcaatccgcgcccccgtgagagggcgac

SEQ ID NO: 1852 - DNA, 35 bp, Artificial Sequence; identical to SEQ ID NO: 1539
  source: /note="Description of Artificial Sequence: Synthetic oligonucleotide"

SEQ ID NO: 1853 - DNA, 35 bp, Artificial Sequence
  source: /note="Description of Artificial Sequence: Synthetic oligonucleotide"
gtctattgccatctttatctggcttttctcaatac

SEQ ID NO: 1854 - DNA, 35 bp, Artificial Sequence; identical to SEQ ID NO: 1545
  source: /note="Description of Artificial Sequence: Synthetic oligonucleotide"

SEQ ID NO: 1855 - DNA, 35 bp, Artificial Sequence
  source: /note="Description of Artificial Sequence: Synthetic oligonucleotide"
gttattgccctctttcttgggctatcttctccagc

SEQ ID NO: 1856 - DNA, 35 bp, Artificial Sequence; identical to SEQ ID NO: 1556
  source: /note="Description of Artificial Sequence: Synthetic oligonucleotide"

SEQ ID NO: 1857 - DNA, 35 bp, Artificial Sequence; identical to SEQ ID NO: 1564
  source: /note="Description of Artificial Sequence: Synthetic oligonucleotide"

SEQ ID NO: 1858 - DNA, 36 bp, Artificial Sequence; identical to SEQ ID NO: 1582
  source: /note="Description of Artificial Sequence: Synthetic oligonucleotide"

SEQ ID NO: 1859 - DNA, 36 bp, Artificial Sequence; identical to SEQ ID NO: 1582
  source: /note="Description of Artificial Sequence: Synthetic oligonucleotide"

SEQ ID NO: 1860 - DNA, 30 bp, Artificial Sequence
  source: /note="Description of Artificial Sequence: Synthetic oligonucleotide"
gttcttaatctaaaatagtgaaatgtaaat

SEQ ID NO: 1861 - DNA, 32 bp, Artificial Sequence
  source: /note="Description of Artificial Sequence: Synthetic oligonucleotide"
gcatttacattacattattttagattaagaac

SEQ ID NO: 1862 - DNA, 36 bp, Artificial Sequence
  source: /note="Description of Artificial Sequence: Synthetic oligonucleotide"
actacattatagctgattctgtaaggaaactatagc

SEQ ID NO: 1863 - DNA, 36 bp, Artificial Sequence; identical to SEQ ID NO: 1862
  source: /note="Description of Artificial Sequence: Synthetic oligonucleotide"

SEQ ID NO: 1864 - DNA, 28 bp, Artificial Sequence
  source: /note="Description of Artificial Sequence: Synthetic oligonucleotide"
tagttcccttcaattttgggattatcca

SEQ ID NO: 1865 - DNA, 26 bp, Artificial Sequence
  source: /note="Description of Artificial Sequence: Synthetic oligonucleotide"
cctttcaaacgaagggcacttacaac

SEQ ID NO: 1866 - DNA, 29 bp, Artificial Sequence
  source: /note="Description of Artificial Sequence: Synthetic oligonucleotide"
gttttaactacttattgtgaaatgtaaat

SEQ ID NO: 1867 - DNA, 29 bp, Artificial Sequence
  source: /note="Description of Artificial Sequence: Synthetic oligonucleotide"
gttttaattacttattgtgaaatgtaaat

SEQ ID NO: 1868 - DNA, 36 bp, Artificial Sequence; identical to SEQ ID NO: 1632
  source: /note="Description of Artificial Sequence: Synthetic oligonucleotide"

SEQ ID NO: 1869 - DNA, 36 bp, Artificial Sequence
  source: /note="Description of Artificial Sequence: Synthetic oligonucleotide"
gatttagagtacctcaaaacagaagaggactaaaac

SEQ ID NO: 1870 - DNA, 36 bp, Artificial Sequence
  source: /note="Description of Artificial Sequence: Synthetic oligonucleotide"
gatttagagtagctcaaaaaagaagaggtctaaaac

SEQ ID NO: 1871 - DNA, 36 bp, Artificial Sequence; identical to SEQ ID NO: 1637
  source: /note="Description of Artificial Sequence: Synthetic oligonucleotide"

SEQ ID NO: 1872 - DNA, 29 bp, Artificial Sequence
  source: /note="Description of Artificial Sequence: Synthetic oligonucleotide"
gttttagtccccttcgtttttggggtagt

SEQ ID NO: 1873 - DNA, 34 bp, Artificial Sequence
  source: /note="Description of Artificial Sequence: Synthetic oligonucleotide"
tcaatccttattttaatggattcactattcttac

SEQ ID NO: 1874 - DNA, 29 bp, Artificial Sequence
  source: /note="Description of Artificial Sequence: Synthetic oligonucleotide"
gttttaatagcacaaattgtattgtaaat

SEQ ID NO: 1875 - DNA, 37 bp, Artificial Sequence
  source: /note="Description of Artificial Sequence: Synthetic oligonucleotide"
gtttcaatccttgttttaatggataacttactttaac

SEQ ID NO: 1876 - DNA, 37 bp, Artificial Sequence
  source: /note="Description of Artificial Sequence: Synthetic oligonucleotide"
gtttcaatccttgttttaatggatactctactttaac

SEQ ID NO: 1877 - DNA, 36 bp, Artificial Sequence; identical to SEQ ID NO: 1664
  source: /note="Description of Artificial Sequence: Synthetic oligonucleotide"

SEQ ID NO: 1878 - DNA, 29 bp, Artificial Sequence
  source: /note="Description of Artificial Sequence: Synthetic oligonucleotide"
acctctcccgccagtaagcggattgagac

SEQ ID NO: 1879 - DNA, 37 bp, Artificial Sequence
  source: /note="Description of Artificial Sequence: Synthetic oligonucleotide"
gcccagacacctctcccgccagtaagcggattgagac

SEQ ID NO: 1880 - DNA, 37 bp, Artificial Sequence; identical to SEQ ID NO: 1879
  source: /note="Description of Artificial Sequence: Synthetic oligonucleotide"

SEQ ID NO: 1881 - DNA, 32 bp, Artificial Sequence
  source: /note="Description of Artificial Sequence: Synthetic oligonucleotide"
gtcgctccccccgcgggggcgtggatcgaaac

SEQ ID NO: 1882 - DNA, 32 bp, Artificial Sequence; identical to SEQ ID NO: 1881
  source: /note="Description of Artificial Sequence: Synthetic oligonucleotide"

SEQ ID NO: 1883 - DNA, 34 bp, Artificial Sequence
  source: /note="Description of Artificial Sequence: Synthetic oligonucleotide"
ggttcagtccgccgtcgtcttggcggtgatgtga

SEQ ID NO: 1884 - DNA, 23 bp, Artificial Sequence
  source: /note="Description of Artificial Sequence: Synthetic oligonucleotide"
gccctctcctcctccctgggccg

SEQ ID NO: 1885 - DNA, 34 bp, Artificial Sequence; identical to SEQ ID NO: 1883
  source: /note="Description of Artificial Sequence: Synthetic oligonucleotide"

SEQ ID NO: 1886 - DNA, 34 bp, Artificial Sequence; identical to SEQ ID NO: 1883
  source: /note="Description of Artificial Sequence: Synthetic oligonucleotide"

SEQ ID NO: 1887 - DNA, 3994 bp, Listeria weihenstephanensis
tggctgctgagctgtctcttaatttatgaaaaaataattatgttttgctaatctgtcaagctgcagattcattaataatctggtatagttatgttgttgcaagcgaataggcggatatattacctcaaaacagaagaggactaaaacccaaacgattggtgttacattattttcatagatttagagtacctcaaaacagaagaggactaaaacgcactctccgacaataatctcgtccattttgatttagagtacctcaaaacaaaagaggactaaaacaactctgtacttgtgaagtacgttaaatccgatttagagtacctcaaaacaaaagaggactaaaacctcttttgtggataagtattcgaaataaagccataaaaactgtgatccaaagaactggattattggtttttatggctttattcaattcttagtattgtagatgaactgtcagcgaatgttgtcttgcaacgtgccttcttgtataatgaatatattgataaataatagaaatttcatacacgcatgaagaaaccaattaaagtttcagcaataatgaagcattaggtacatgactataaaaccaaatggagctgagtagacagatgaaaatcacaaagatgagagtagatggaagaactatcgtaatggagaggacaagtaaggaaggtcaactggtttatgaaggtatcgatggaaataagacaacagaaattatatttgataagaaaaaagaatcgttttataagagtatcctcaataaaactgtgagaaaacctgatgaaaaaagaaaaaaaataggcgtaagcaggcaattaataaagcgattaataaagaaataacagaattaatgttggcgctgttacatcaagaagtgccaagccaaaagttacataatttaaagagtctaaatacggaatctttaactaaactatttaaaccgaagttccaaaacatgatttcttatccgcctagcaaaggtgccgaacatgttcaattttgccttacagatatagcggtaccagcgattcgagatttagatgaaattaagccagattggggcattttttttgaaaaattgaaaccctatacggattgggcagaatcatacattcactataagcagacaaccatacagaaatccattgagcaaaacaaaatacagtcccctgattcgccaaggaaattagtattgcaaaaatatgtcacagcctttttgaatggagaaccgctgggactcgatcttgtggcgaaaaaatataaactggcagacttagcggagtcgtttaaagtagtagatttgaacgaggataaaagtgcaaactataaaattaaagcgtgcttgcaacaacatcagcgaaatattttggatgaattgaaagaagatccagagttaaatcaatatggtatagaagtgaagaagtatatacagcgatatttcccaatcaaacgtgcaccgaatagaagtaaacatgcgcgagcggactttttgaaaaaggaattaattgagtctacagtggagcagcaatttaaaaatgctgtatatcattatgtactggaacaaggaaaaatggaggcatatgagctaacagatcctaaaacaaaagacttgcaggatattagatctggtgaggcatttagcttcaaatttattaatgcttgcgccttcgcatccaataatttgaagatgattttaaaccctgaatgtgaaaaggatattttaggtaagggcgattttaaaaagaatttgccaaacagtactacgcagtctgatgttgtgaaaaaaatgattccttttttctcggatgagattcaaaatgtgaattttgatgaagctatctgggcgattaggggctctattcagcaaattagaaatgaggtttaccattgcaaaaagcattcttggaaaagcatacttaaaataaaaggctttgaatttgaacctaacaatatgaaatatacggattctgatatgcaaaaattgatggataaagatatcgccaaaattccagacttcatcgaagaaaaacttaaaagtagtgggataataaggttctacagtcatgataaattgcagtctatctgggaaatgaagcaagggttttcgttgttgactactaatgcgccgtttgtcccaagctttaaacgtgtctacgcaaaagggcacgactaccaaacttctaaaaatagatattatgatttaggtttgactacttttgatattttggaatatggagaagaagattttcgtgcacgctatttcctgacgaagctagtttattatcaacaatttatgccatggtttacagctgataataatgctttccgagatgctgccaattttgtattgcgattaaataaaaatagacagcaggatgcaaaagcttttattaacattagagaagttgaagaaggtgagatgcctagagactatatgggctatgtccaaggtcaaatagcgatacatgaggattcaactgaggatacaccgaatcattttgaaaaatttattagccaggtttttattaagggatttgatagtcatatgagatctgctgatttaaaatttattaaaaatccaagaaatcaggggctagaacaaagtgaaattgaggaaatgagctttgatattaaagtagagccatcatttttgaaaaataaagatgactatattgcattttggacattctgcaaaatgctggatgctaggcatttaagcgagctaagaaacgaaatgattaagtatgacggtcatttaactggagaacaagaaatcattggtttagcattgcttggagtggattcacgagagaatgattggaagcaattttttagctcagaacgggaatacgagaaaattatgaagggctatgttggagaggaattgtatcagcgggaaccgtaccgacaaagtgatggcaaaacaccgattctttttcgtggtgtagagcaagcgaggaagtatggtactgaaacagtgattcaacggctttttgatgctagtcctgagtttaaagtgtcgaaatgcaacataactgagtgggagcggcaaaaagaaaccattgaagagactattgagcgaagaaaagaattgcataatgaatgggaaaaaaatcccaaaaaaccgcaaaataatgcattttttaaagagtataaagagtgttgtgacgctattgatgcttacaattggcataaaaataaaactacgcttgtatacgttaatgagctgcaccatttgctaattgaaattctgggaagatatgttggctatgtagcaatagctgatagagactttcaatgtatggcgaatcaatattttaagcattcaggaataactgagagagtggaatattggggcgataatagactaaaaagtattaaaaagctggatacattcttgaaaaaagaaggactgtttgtttctgagaaaaatgcaaggaatcatatagcgcatttaaattatttatcactcaaatctgagtgcacgttgctgtatttatctgagaggttgagagaaatttttaagtatgatcgtaaattaaagaatgccgtttccaagtcattaatcgatattttagatagacatggtatgagcgtcgtatttgctaacttgaaagaaaataaacataggttggtgataaaaagcttagagccaaaaaaattgagacatctaggtgagaaaaaaatcgataatggttatatagaaacaaatcaagtttcagaagagtattgtggtatagtaaagagactattagaaatttgatatagaatgttgcagttaatttcaaaatgaaattggatgggagaatgcaatttcattttgctattaaaaaatacctcaaaacagaagaggactaaaacaaatgattgcaagccgttacaaaaaatatgatttagagtacctcagaacaaaagagggctaaaactagaataatcgagtgagacggtctacaagtgatttagagtagctcaaaaaagaagaggtctaaaa

SEQ ID NO: 1888 - DNA, 4053 bp, Listeria newyorkensis
tgtattctgagttgtctcttaatttatgaaaaaataattatgttttggtaatctgtcaagatgcagatccattaataatctggtatagttatgttgttgcaagtgaatatattacctcaaaataaaagaggactaaaactaattggtggcgtgatacgccgtaatgcttgatttagagtacctcaaaacaaaagaggactaaaactacttgtcgatatggtatagcttttttcagatttagagtacctcaaaacaaaagaggactaaaactaaagcttctaaatggtggcgcgttacgccgatttagaatacctcaaaacaaaagaggactaaaacctagcaagccggtcgccgcgctcaaagtaagatttagagtacctcaaaacaaaagaggactaaaacctcttttgtggataagtattcgaaataaagccataaaaactgtgatccaaagagctggattattggtttttatggctttattcaattcttagtattgtagatgaaccatcagtgaatgttgtcttgcaacgtgccttcttgtataatgaatatattgataaataatagaaatttcatacacgcatgaagaaaccaattaaattttcagcattaatgaagcattaggtacatgactataaaaccaaatggagctgagtagacagatgaaaatcacaaagatgagagtagatggaagaactatcgtaatggagaggacaagcaaggaaggtcaactgggttatgaaggtatcgatggaaataagacaacagaaattatatttgataagaaaaaagagtcattttataagagtatcctcaataaaactgtgagaaaacccgatgaaaaagaaaagaataggcgtaagcaggcaattaataaagcgattaataaagaaataacagaattaatgttggcggtgttacatcaagaagtgccaagccaaaagttacataatttaaagagtctaaatacggaatctttaactaaactatttaaaccgaagttccaaaacatgatttcttatccgcctagcaaaggtgccgaacatgttcagttttgccttacagatatagcggtaccagcgattcgagatttagatgaaattaagccagattggggcattttttttgaaaaattgaaaccctatacggattgggcagaatcatacattcactataagcagacaaccatacagaaatccattgagcaaaacaaaatacagtcccctgattcgccaaggaaattagtattgcaaaaatatgtcacagcctttttgaatggagaaccgctgggactcgatcttgtggcgaaaaaatataaactggcagacttagcggagtcgtttaaattagtagatttgaacgaggataaaagtgcaaactataaaattaaagcgtgcttgcaacaacatcagcgaaatattttggatgaattgaaagaagatccggagttaaatcaatatggtatagaagtgaagaaatatatacagcgatatttcccaatcaaacgtgcaccgaatagaagtaaacatgcacgagcggactttttgaaaaaggaattaattgagtctacagtggagcaacaatttaaaaatgctgtatatcattatgtactggaacaaggcaaaatggaggcatatgagctaacagatcctaaaacaaaagacttgcaggatattagatctggtgaggcatttagcttcaaatttattaatgcttgcgccttcgcatcgaataatttgaagatgattttaaaccctgaatgtgaaaaggatatcctaggtaagggcaattttaaaaagaatttgccaaacagtactacgcgatctgatgttgtgaagaaaatgattccctttttctcggatgagcttcaaaatgtgaattttgatgaagctatctgggcgattaggggctctattcagcaaattagaaatgaggtttaccattgtaaaaagcattcttggaaaagcatacttaaaataaaaggctttgaatttgaacctaacaatatgaaatatgcggattctgatatgcaaaaattgatggataaagatatcgccaaaattccagagttcatcgaagaaaaacttaaaagtagtggagtagtaaggttctacaggcatgatgagttgcaatccatatgggaaatgaaacaaggattttcgttgctgactactaatgcgccgtttgtcccaagctttaagcgtgtctacgcaaaagggcacgactaccaaacttctaaaaatagatactataatttggatttgactacttttgatattttggaatatggagaagaagattttcgtgcacgctatttcctgacgaagctagtttattatcagcaatttatgccatggtttacagctgataataatgctttccgagatgctgccaattttgtattgcgattaaataaaaatagacagcaggatgcaaaagcttttattaacattagagaagttgaagaaggtgagatgcctagagactatatgggttatgtccaaggtcaaatagcgatacatgaggattcaattgaggatacaccgaatcattttgagaaatttattagtcaggtttttattaagggctttgataggcatatgagatctgctaatttaaaatttattaaaaatccaagaaatcaggggctagaacaaagtgagattgaggaaatgagctttgatattaaagtggagccgtcatttttgaaaaataaagatgactatattgcattttggatattctgcaaaatgcttgatgctaggcatttaagcgagctaagaaacgaaatgattaagtatgacggtcatttaactggagaacaagaaatcattggtttagcattgctcggagtggattcacgagagaatgattggaagcagttttttagctcagaacgggaatacgagaaaattatgaagggctatgttgtagaggaattgtatcagcgggaaccgtaccgacaaagtgatggcaaaacaccgattctttttcgtggtgtagagcaagcgaggaagtatggtactgaaacagtgattcaacggctttttgatgctaatcctgagttcaaagtgtcaaaatgcaacttagcagagtgggagcggcaaaaagaaaccattgaagagactattaagcgaagaaaagaattgcataatgaatgggcaaaaaatccaaaaaaaccgcaaaataatgcattttttaaagagtataaagagtgttgtgacgctattgacgcttacaattggcataaaaataaaactacgcttgcatacgttaatgagctgcaccatttgctaattgaaattctgggaagatatgttggctatgtagcaatagctgatagagactttcaatgtatggcgaatcaatattttaagcattcaggaataactgagagagtggaatattggggcgataatagactaaaaagtattaaaaagctggatacattcttgaaaaaagaaggactgtttgtttctgagaaaaatgcaaggaatcatatagcgcatttaaattatttatcactcaaatctgagtgcacgttgctgtatttatccgagaggttgagagaaatttttaagtatgatcgtaaattaaagaatgccgtttccaagtcattaatcgatattttagatagacatggtatgagcgtcgtatttgctaacttgaaagaaaataaacataggttggtgataaaaagcttagagccaaaaaaattgagacatctgggtgggaaaaaaatcgatggtggttatatagaaacaaatcaagtttcagaagagtattgtggtatagtgaagagactgttagaaatgtgatgtaggatgttacagtcaatctcaaaatgaaattggaagttacaagaggacgtaatatgatgttactattaaaaatacctcagaatagaagaggactaaaacaaatgattgcaagccgttacaaaaaatatgatttagagtacctcagaacaaaagagggctaaaactagaataatcgattgagacggtctacaagtgatttagagtacctcaaaacagaagaggactaaaa

SEQ ID NO: 1889 - DNA, 36 bp, Artificial Sequence; identical to SEQ ID NO: 1721
  source: /note="Description of Artificial Sequence: Synthetic oligonucleotide"

SEQ ID NO: 1890 - DNA, 36 bp, Artificial Sequence; identical to SEQ ID NO: 1721
  source: /note="Description of Artificial Sequence: Synthetic oligonucleotide"

SEQ ID NO: 1891 - DNA, 36 bp, Artificial Sequence
  source: /note="Description of Artificial Sequence: Synthetic oligonucleotide"
attaaagactacccctaaatgtaaggggactataac

SEQ ID NO: 1892 - DNA, 36 bp, Artificial Sequence; identical to SEQ ID NO: 1595
  source: /note="Description of Artificial Sequence: Synthetic oligonucleotide"

SEQ ID NO: 1893 - RNA, 29 nt, Artificial Sequence
  source: /note="Description of Artificial Sequence: Synthetic oligonucleotide"
acuaccucuauaugaaagaggacuaaaac

SEQ ID NO: 1894 - RNA, 47 nt, Artificial Sequence
  source: /note="Description of Artificial Sequence: Synthetic oligonucleotide"
  modified_base (30)..(47): a, c, u, g, unknown or other
  variation (45)..(47): /replace=" "
  misc_feature (1)..(47): /note="Variant nucleotides given in the sequence have no preference with respect to those in the annotations for variant positions"
acuaccucuauaugaaagaggacuaaaacnnnnnnnnnnnnnnnnnn

SEQ ID NO: 1895 - RNA, 56 nt, Artificial Sequence
  source: /note="Description of Artificial Sequence: Synthetic oligonucleotide"
  modified_base (1)..(28): a, c, u, g, unknown or other
  variation (15)..(28): /replace=" "
  misc_feature (1)..(56): /note="Variant nucleotides given in the sequence have no preference with respect to those in the annotations for variant positions"
nnnnnnnnnnnnnnnnnnnnnnnnnnnnccaccccaauaucgaaggggacuaaaac

SEQ ID NO: 1896 - RNA, 56 nt, Artificial Sequence; identical to SEQ ID NO: 1895
  source: /note="Description of Artificial Sequence: Synthetic oligonucleotide"
  modified_base (1)..(28): a, c, u, g, unknown or other
  variation (15)..(28): /replace=" "
  misc_feature (1)..(56): /note="Variant nucleotides given in the sequence have no preference with respect to those in the annotations for variant positions"

SEQ ID NO: 1897 - RNA, 28 nt, Artificial Sequence
  source: /note="Description of Artificial Sequence: Synthetic oligonucleotide"
ccaccccaauaucgaaggggacuaaaac

SEQ ID NO: 1898 - RNA, 56 nt, Artificial Sequence
  source: /note="Description of Artificial Sequence: Synthetic oligonucleotide"
  modified_base (29)..(56): a, c, u, g, unknown or other
  variation (43)..(56): /replace=" "
  misc_feature (1)..(56): /note="Variant nucleotides given in the sequence have no preference with respect to those in the annotations for variant positions"
ccaccccaauaucgaaggggacuaaaacnnnnnnnnnnnnnnnnnnnnnnnnnnnn

SEQ ID NO: 1899 - RNA, 50 nt, Artificial Sequence
  source: /note="Description of Artificial Sequence: Synthetic oligonucleotide"
aggugaaggucguccguacgaagguacccagaccgcuaaacugaaaguua

SEQ ID NO: 1900 - DNA, 65 bp, Artificial Sequence
  source: /note="Description of Artificial Sequence: Synthetic oligonucleotide"
atatcaatatggattacttggtagaacagcaatctagttttagtccccttcgatattggggtgct

SEQ ID NO: 1901 - RNA, 29 nt, Artificial Sequence
  source: /note="Description of Artificial Sequence: Synthetic oligonucleotide"
ccgucugucguauccagcugcaaacuucc

SEQ ID NO: 1902 - RNA, 29 nt, Artificial Sequence
  source: /note="Description of Artificial Sequence: Synthetic oligonucleotide"
gucguauccagcugcaaacuuccagacaa

SEQ ID NO: 1903 - RNA, 29 nt, Artificial Sequence
  source: /note="Description of Artificial Sequence: Synthetic oligonucleotide"
guuagauggccgucugucguauccagcug

SEQ ID NO: 1904 - RNA, 29 nt, Artificial Sequence
  source: /note="Description of Artificial Sequence: Synthetic oligonucleotide"
cagacaacgugcaacauaucgcgacguau

SEQ ID NO: 1905 - RNA, 70 nt, Artificial Sequence
  source: /note="Description of Artificial Sequence: Synthetic oligonucleotide"
uacccggggauccucuagaaauauggauuacuugguagaacagcaaucuacucgaccugcaggcaugcaa

SEQ ID NO: 1906 - RNA, 56 nt, Artificial Sequence; identical to SEQ ID NO: 72
  source: /note="Description of Artificial Sequence: Synthetic oligonucleotide"

SEQ ID NO: 1907 - RNA, 58 nt, Artificial Sequence
  source: /note="Description of Artificial Sequence: Synthetic oligonucleotide"
ggccagugaauucgagcucgguacccggggauccucuagaaauauggauuacuuggua

SEQ ID NO: 1908 - RNA, 79 nt, Artificial Sequence
  source: /note="Description of Artificial Sequence: Synthetic oligonucleotide"
gaacagcaaucuacucgaccugcaggcaugcaagcuuggcguaaucauggucauagcuguuuccuguguuuauccgcuc

SEQ ID NO: 1909 - RNA, 36 nt, Artificial Sequence
  source: /note="Description of Artificial Sequence: Synthetic oligonucleotide"
acaauuccacacaacauacgagccggaagcauaaag

SEQ ID NO: 1910 - RNA, 53 nt, Artificial Sequence
  source: /note="Description of Artificial Sequence: Synthetic oligonucleotide"
gugaauucgagcucgguacccggggauccucuagaaauauggauuacuuggua

SEQ ID NO: 1911 - RNA, 56 nt, Artificial Sequence; identical to SEQ ID NO: 72
  source: /note="Description of Artificial Sequence: Synthetic oligonucleotide"

SEQ ID NO: 1912 - RNA, 24 nt, Artificial Sequence
  source: /note="Description of Artificial Sequence: Synthetic oligonucleotide"
uagauugcuguucuaccaaguaau

SEQ ID NO: 1913 - RNA, 23 nt, Artificial Sequence
  source: /note="Description of Artificial Sequence: Synthetic oligonucleotide"
uagauugcuguucuaccaaguaa

SEQ ID NO: 1914 - RNA, 12 nt, Artificial Sequence
  source: /note="Description of Artificial Sequence: Synthetic oligonucleotide"
uagauugcuguu

SEQ ID NO: 1915 - RNA, 28 nt, Artificial Sequence
  source: /note="Description of Artificial Sequence: Synthetic oligonucleotide"
ccaccccaauaucgaaggggacuaaaac

SEQ ID NO: 1916 - RNA, 36 nt, Artificial Sequence
  source: /note="Description of Artificial Sequence: Synthetic oligonucleotide"
gauauagaccaccccaauaucgaaggggacuaaaac

SEQ ID NO: 1917 - RNA, 56 nt, Artificial Sequence; identical to SEQ ID NO: 72
  source: /note="Description of Artificial Sequence: Synthetic oligonucleotide"

SEQ ID NO: 1918 - RNA, 28 nt, Artificial Sequence
  source: /note="Description of Artificial Sequence: Synthetic oligonucleotide"
ccacccgaauaucgaacgggacuaaaac

SEQ ID NO: 1919 - RNA, 28 nt, Artificial Sequence
  source: /note="Description of Artificial Sequence: Synthetic oligonucleotide"
ccaccgcaauaucgaagcggacuaaaac

SEQ ID NO: 1920 - RNA, 28 nt, Artificial Sequence
  source: /note="Description of Artificial Sequence: Synthetic oligonucleotide"
ccacgccaauaucgaaggcgacuaaaac

SEQ ID NO: 1921 - RNA, 28 nt, Artificial Sequence
  source: /note="Description of Artificial Sequence: Synthetic oligonucleotide"
ccagcccaauaucgaagggcacuaaaac

SEQ ID NO: 1922 - RNA, 28 nt, Artificial Sequence
  source: /note="Description of Artificial Sequence: Synthetic oligonucleotide"
ccaggggaauaucgaaccccacuaaaac

SEQ ID NO: 1923 - RNA, 29 nt, Artificial Sequence
  source: /note="Description of Artificial Sequence: Synthetic oligonucleotide"
ccaccaccaauaucgaaggggacuaaaac

SEQ ID NO: 1924 - RNA, 28 nt, Artificial Sequence
  source: /note="Description of Artificial Sequence: Synthetic oligonucleotide"
ccaacccaauaucgaaggggacuaaaac

SEQ ID NO: 1925 - RNA, 28 nt, Artificial Sequence
  source: /note="Description of Artificial Sequence: Synthetic oligonucleotide"
ccacccaaauaucgaaggggacuaaaac

SEQ ID NO: 1926 - RNA, 30 nt, Artificial Sequence
  source: /note="Description of Artificial Sequence: Synthetic oligonucleotide"
ccacccccaauaucgaagggggacuaaaac

SEQ ID NO: 1927 - RNA, 28 nt, Artificial Sequence
  source: /note="Description of Artificial Sequence: Synthetic oligonucleotide"
ccaccccaauaucgaaggggacuaaaac

SEQ ID NO: 1928 - RNA, 28 nt, Artificial Sequence
  source: /note="Description of Artificial Sequence: Synthetic oligonucleotide"
ccacccgaauaucgaacgggacuaaaac

SEQ ID NO: 1929 - RNA, 28 nt, Artificial Sequence
  source: /note="Description of Artificial Sequence: Synthetic oligonucleotide"
ccaccgcaauaucgaagcggacuaaaac

SEQ ID NO: 1930 - RNA, 28 nt, Artificial Sequence
  source: /note="Description of Artificial Sequence: Synthetic oligonucleotide"
ccacgccaauaucgaaggcgacuaaaac

SEQ ID NO: 1931 - RNA, 28 nt, Artificial Sequence
  source: /note="Description of Artificial Sequence: Synthetic oligonucleotide"
ccagcccaauaucgaagggcacuaaaac

SEQ ID NO: 1932 - RNA, 28 nt, Artificial Sequence
  source: /note="Description of Artificial Sequence: Synthetic oligonucleotide"
ccaggggaauaucgaaccccacuaaaac

SEQ ID NO: 1933 - RNA, 29 nt, Artificial Sequence
  source: /note="Description of Artificial Sequence: Synthetic oligonucleotide"
ccaccaccaauaucgaaggggacuaaaac

SEQ ID NO: 1934 - RNA, 28 nt, Artificial Sequence
  source: /note="Description of Artificial Sequence: Synthetic oligonucleotide"
ccaacccaauaucgaaggggacuaaaac

SEQ ID NO: 1935 - RNA, 28 nt, Artificial Sequence
  source: /note="Description of Artificial Sequence: Synthetic oligonucleotide"
ccacccaaauaucgaaggggacuaaaac

SEQ ID NO: 1936 - RNA, 30 nt, Artificial Sequence; identical to SEQ ID NO: 1926
  source: /note="Description of Artificial Sequence: Synthetic oligonucleotide"

SEQ ID NO: 1937 - RNA, 28 nt, Artificial Sequence
  source: /note="Description of Artificial Sequence: Synthetic oligonucleotide"
ccaccccaauaucgaaggggacuaaaac

SEQ ID NO: 1938 - RNA, 27 nt, Artificial Sequence
  source: /note="Description of Artificial Sequence: Synthetic oligonucleotide"
ccaccccauaucgaaggggacuaaaac

SEQ ID NO: 1939 - RNA, 25 nt, Artificial Sequence
  source: /note="Description of Artificial Sequence: Synthetic oligonucleotide"
ccaccccaucgaaggggacuaaaac

SEQ ID NO: 1940 - RNA, 21 nt, Artificial Sequence
  source: /note="Description of Artificial Sequence: Synthetic oligonucleotide"
ccaccccaaggggacuaaaac

SEQ ID NO: 1941 - RNA, 29 nt, Artificial Sequence
  source: /note="Description of Artificial Sequence: Synthetic oligonucleotide"
ccaccccaaauaucgaaggggacuaaaac

SEQ ID NO: 1942 - RNA, 31 nt, Artificial Sequence
  source: /note="Description of Artificial Sequence: Synthetic oligonucleotide"
ccaccccaaaaauaucgaaggggacuaaaac

SEQ ID NO: 1943 - RNA, 35 nt, Artificial Sequence
  source: /note="Description of Artificial Sequence: Synthetic oligonucleotide"
ccaccccaaaaaaaaauauggaaggggacuaaaac

SEQ ID NO: 1944 - RNA, 28 nt, Artificial Sequence
  source: /note="Description of Artificial Sequence: Synthetic oligonucleotide"
ccaccccgauaucgaaggggacuaaaac

SEQ ID NO: 1945 - RNA, 28 nt, Artificial Sequence
  source: /note="Description of Artificial Sequence: Synthetic oligonucleotide"
ccaccccaaaaucgaaggggacuaaaac

SEQ ID NO: 1946 - RNA, 28 nt, Artificial Sequence
  source: /note="Description of Artificial Sequence: Synthetic oligonucleotide"
ccaccccaauauccaaggggacuaaaac

SEQ ID NO: 1947 - RNA, 28 nt, Artificial Sequence
  source: /note="Description of Artificial Sequence: Synthetic oligonucleotide"
ccaccccaauaucgaaggggacuaaaac

SEQ ID NO: 1948 - RNA, 27 nt, Artificial Sequence
  source: /note="Description of Artificial Sequence: Synthetic oligonucleotide"
ccaccccauacugaaggggacuaaaac

SEQ ID NO: 1949 - RNA, 25 nt, Artificial Sequence
  source: /note="Description of Artificial Sequence: Synthetic oligonucleotide"
ccaccccaugcaaggggacuaaaac

SEQ ID NO: 1950 - RNA, 21 nt, Artificial Sequence
  source: /note="Description of Artificial Sequence: Synthetic oligonucleotide"
ccaccccaaggggacuaaaac

SEQ ID NO: 1951 - RNA, 29 nt, Artificial Sequence
  source: /note="Description of Artificial Sequence: Synthetic oligonucleotide"
ccaccccaaauuacgaaggggacuaaaac

SEQ ID NO: 1952 - RNA, 31 nt, Artificial Sequence
  source: /note="Description of Artificial Sequence: Synthetic oligonucleotide"
ccaccccaaaaaauucgaaggggacuaaaac

SEQ ID NO: 1953 - RNA, 35 nt, Artificial Sequence
  source: /note="Description of Artificial Sequence: Synthetic oligonucleotide"
ccaccccaaaaaaaaauaucgaaggggacuaaaac

SEQ ID NO: 1954 - RNA, 28 nt, Artificial Sequence
  source: /note="Description of Artificial Sequence: Synthetic oligonucleotide"
ccaccccgauaucgaaggggacuaaaac

SEQ ID NO: 1955 - RNA, 28 nt, Artificial Sequence
  source: /note="Description of Artificial Sequence: Synthetic oligonucleotide"
ccaccccaaaaucgaaggggacuaaaac

SEQ ID NO: 1956 - RNA, 28 nt, Artificial Sequence
  source: /note="Description of Artificial Sequence: Synthetic oligonucleotide"
ccaccccaauauccaaggggacuaaaac

SEQ ID NO: 1957 - RNA, 55 nt, Artificial Sequence
  source: /note="Description of Artificial Sequence: Synthetic oligonucleotide"
aucaaguuagauggccgucugucguauccagcugcaaacuuccagacaacgugca

SEQ ID NO: 1958 - RNA, 56 nt, Artificial Sequence
  source: /note="Description of Artificial Sequence: Synthetic oligonucleotide"
ccaccccaauaucgaaggggacuaaaacaaguuugcagcuggauacgacagacggc

SEQ ID NO: 1959 - DNA, 33 bp, Artificial Sequence
  source: /note="Description of Artificial Sequence: Synthetic oligonucleotide"
ggtccgctgccgttcgcttgggacatcctgtcc

SEQ ID NO: 1960 - DNA, 70 bp, Artificial Sequence
  source: /note="Description of Artificial Sequence: Synthetic oligonucleotide"
ataggccagtgaattcgagctcgaatatggattacttggtagaacagcaatctacgccggaagcataaag

SEQ ID NO: 1961 - DNA, 173 bp, Artificial Sequence
  source: /note="Description of Artificial Sequence: Synthetic polynucleotide"
ggccagtgaattcgagctcggtacccggggatcctctagaaatatggattacttggtagaacaccaatctactcgacctgcaggcatgcaagcttggcgtaatcatggtcatagctgtttcctgtgtttatccgctcacaattccacacaacatacgagccggaagcataaag

SEQ ID NO: 1962 - protein, 16 aa, Lactococcus lactis
LQKFTGDIENLVKASL

SEQ ID NO: 1963 - protein, 15 aa, Lactococcus lactis
WIRAGWFIRNRSAHY

SEQ ID NO: 1964 - protein, 16 aa, Lactococcus lactis
LQKFTGDIENLVKASL

SEQ ID NO: 1965 - protein, 15 aa, Lactococcus lactis
WIRAGWFIRNRSAHY

SEQ ID NO: 1966 - protein, 16 aa, Thermus aquaticus
PLEERGVAEAWLNAKV

SEQ ID NO: 1967 - protein, 10 aa, Thermus aquaticus
ADLRNDVAHA

SEQ ID NO: 1968 - protein, 16 aa, Thermus aquaticus
PLEERGVAEAWLNAKV

SEQ ID NO: 1969 - protein, 10 aa, Thermus aquaticus
ADLRNDVAHA

SEQ ID NO: 1970 - protein, 16 aa, Mycobacterium tuberculosis
RSATPAITIVLRAAVA

SEQ ID NO: 1971 - protein, 15 aa, Mycobacterium tuberculosis
LGRFESRVRNTAAHE

SEQ ID NO: 1972 - protein, 16 aa, Mycobacterium tuberculosis
RSATPAITIVLRAAVA

SEQ ID NO: 1973 - protein, 15 aa, Mycobacterium tuberculosis
LGRFESRVRNTAAHE

SEQ ID NO: 1974 - protein, 16 aa, Escherichia coli
LYPELRTIEGVLKSKM

SEQ ID NO: 1975 - protein, 14 aa, Escherichia coli
AYTFFNVERHSLFH

SEQ ID NO: 1976 - protein, 16 aa, Escherichia coli
LYPELRTIEGVLKSKM

SEQ ID NO: 1977 - protein, 14 aa, Escherichia coli
AYTFFNVERHSLFH

SEQ ID NO: 1978 - protein, 16 aa, Homo sapiens
GNELPLAVASTADLIR

SEQ ID NO: 1979 - protein, 15 aa, Homo sapiens
IPDWIVDLRHELTHK

SEQ ID NO: 1980 - protein, 16 aa, Homo sapiens
GNELPLAVASTADLIR

SEQ ID NO: 1981 - protein, 15 aa, Homo sapiens
IPDWIVDLRHELTHK

SEQ ID NO: 1982 - protein, 16 aa, Thermus thermophilus
IQRFEYTFEAFWKALQ

SEQ ID NO: 1983 - protein, 15 aa, Thermus thermophilus
  MOD_RES (5)..(5): Any amino acid
LALGXVDDRSLTVHT

SEQ ID NO: 1984 - protein, 16 aa, Thermus thermophilus
IQRFEYTFEAFWKALQ

SEQ ID NO: 1985 - protein, 15 aa, Thermus thermophilus
  MOD_RES (5)..(5): Any amino acid
LALGXVDDRSLTVHT

SEQ ID NO: 1986 - protein, 16 aa, Unknown
  source: /note="Description of Unknown: Lachnospiraceae bacterium"
DYEIIKAEESLQRDIS

SEQ ID NO: 1987 - protein, 15 aa, Unknown
  source: /note="Description of Unknown: Lachnospiraceae bacterium"
LKSMLYSMRNSSFHF

SEQ ID NO: 1988 - protein, 16 aa, Unknown
  source: /note="Description of Unknown: Lachnospiraceae bacterium"
LIKWCYLRERDLMYFQ

SEQ ID NO: 1989 - protein, 14 aa, Unknown
  source: /note="Description of Unknown: Lachnospiraceae bacterium"
FRNEIDHFHYFYDR

SEQ ID NO: 1990 - protein, 16 aa, Unknown
  source: /note="Description of Unknown: Lachnospiraceae bacterium"
DYELIKAEEMLQRETA

SEQ ID NO: 1991 - protein, 15 aa, Unknown
  source: /note="Description of Unknown: Lachnospiraceae bacterium"
LKDVIYSMRNDSFHY

SEQ ID NO: 1992 - protein, 16 aa, Unknown
  source: /note="Description of Unknown: Lachnospiraceae bacterium"
LINWIYLRERDLMNFQ

SEQ ID NO: 1993 - protein, 14 aa, Unknown
  source: /note="Description of Unknown: Lachnospiraceae bacterium"
LRNYIEHFRYYSSF

SEQ ID NO: 1994 - protein, 16 aa, Clostridium aminophilum
DYEQIRADETLQRQLS

SEQ ID NO: 1995 - protein, 15 aa, Clostridium aminophilum
LRKAIYSLRNETFHF

SEQ ID NO: 1996 - protein, 16 aa, Clostridium aminophilum
LISWSFLRERDLLYFQ

SEQ ID NO: 1997 - protein, 14 aa, Clostridium aminophilum
VRKYVDHFKYYATS

SEQ ID NO: 1998 - protein, 16 aa, Unknown
  source: /note="Description of Unknown: Lachnospiraceae bacterium"
DYEQIKADEMLQREVA

SEQ ID NO: 1999 - protein, 15 aa, Unknown
  source: /note="Description of Unknown: Lachnospiraceae bacterium"
IIQIIYSLRNKSFHF

SEQ ID NO: 2000 - protein, 16 aa, Unknown
  source: /note="Description of Unknown: Lachnospiraceae bacterium"
LISWSYLRERDLLYFQ

SEQ ID NO: 2001 - protein, 14 aa, Unknown
  source: /note="Description of Unknown: Lachnospiraceae bacterium"
LRKYVDHFKYYAYG

SEQ ID NO: 2002 - protein, 16 aa, Carnobacterium gallinarum
KLQEIGIYEGFQTKFM

SEQ ID NO: 2003 - protein, 15 aa, Carnobacterium gallinarum
LRGSVQQIRNEIFHS

SEQ ID NO: 2004 - protein, 16 aa, Carnobacterium gallinarum
MVGFSALFERDLVYFS

SEQ ID NO: 2005 - protein, 14 aa, Carnobacterium gallinarum
IRNQTAHLSVLQLE

SEQ ID NO: 2006 - protein, 16 aa, Carnobacterium gallinarum
TLQEIGMYEGFQTKFM

SEQ ID NO: 2007 - protein, 15 aa, Carnobacterium gallinarum
IRGAVQRVRNQIFHQ

SEQ ID NO: 2008 - protein, 16 aa, Carnobacterium gallinarum
MVGFSVLFERDFVYMG

SEQ ID NO: 2009 - protein, 14 aa, Carnobacterium gallinarum
IRNNIAHLHVLRND

SEQ ID NO: 2010 - protein, 16 aa, Paludibacter propionicigenes
DLIRIKTNEAFVLNLT

SEQ ID NO: 2011 - protein, 15 aa, Paludibacter propionicigenes
IRGAVQQIRNNVNHY

SEQ ID NO: 2012 - protein, 16 aa, Paludibacter propionicigenes
MAGFVALFDRDFQFFD

SEQ ID NO: 2013 - protein, 14 aa, Paludibacter propionicigenes
IRNHIAHFNYLTKD

SEQ ID NO: 2014 - protein, 16 aa, Listeria seeligeri
SLQKIKIEEAFALKFI

SEQ ID NO: 2015 - protein, 15 aa, Listeria seeligeri
LRGAIAPIRNEIIHL

SEQ ID NO: 2016 - protein, 16 aa, Listeria seeligeri
LAGYMSIADRDFQFSS

SEQ ID NO: 2017 - protein, 14 aa, Listeria seeligeri
KRNNISHFNYLNGQ

SEQ ID NO: 2018 - protein, 16 aa, Listeria weihenstephanensis
DLQDIRSGEAFSFKFI

SEQ ID NO: 2019 - protein, 15 aa, Listeria weihenstephanensis
IRGSIQQIRNEVYHC

SEQ ID NO: 2020 - protein, 16 aa, Listeria weihenstephanensis
YVGYVAIADRDFQCMA

SEQ ID NO: 2021 - protein, 14 aa, Listeria weihenstephanensis
ARNHIAHLNYLSLK

SEQ ID NO: 2022 - protein, 16 aa, Listeria newyorkensis
DLQDIRSGEAFSFKFI

SEQ ID NO: 2023 - protein, 15 aa, Listeria newyorkensis
IRGSIQQIRNEVYHC

SEQ ID NO: 2024 - protein, 16 aa, Listeria newyorkensis
YVGYVAIADRDFQCMA

SEQ ID NO: 2025 - protein, 14 aa, Listeria newyorkensis
ARNHIAHLNYLSLK

SEQ ID NO: 2026 - protein, 16 aa, Leptotrichia wadei
DLEYIKTKETLIRKMA

SEQ ID NO: 2027 - protein, 15 aa, Leptotrichia wadei
ISYSIYNVRNGVGHF

SEQ ID NO: 2028 - protein, 16 aa, Leptotrichia wadei
NVAFFNKWERDFKFIV

SEQ ID NO: 2029 - protein, 14 aa, Leptotrichia wadei
FRNYIAHFLHLHTK

SEQ ID NO: 2030 - protein, 16 aa, Leptotrichia wadei
INMRNRQTEAFLRSII

SEQ ID NO: 2031 - protein, 15 aa, Leptotrichia wadei
MLNAITSIRHRVVHY

SEQ ID NO: 2032 - protein, 16 aa, Leptotrichia wadei
LAGYTSLWERDLQFKL

SEQ ID NO: 2033 - protein, 14 aa, Leptotrichia wadei
IRNYIAHFNYIPDA

SEQ ID NO: 2034 - protein, 16 aa, Leptotrichia wadei
FIARNRQNEAFLRNII

SEQ ID NO: 2035 - protein, 15 aa, Leptotrichia wadei
IDEAISSIRHGIVHF

SEQ ID NO: 2036 - protein, 16 aa, Leptotrichia wadei
LVGYTSIWERDLRFRL

SEQ ID NO: 2037 - protein, 14 aa, Leptotrichia wadei
IRNYIAHFNYIPHA

SEQ ID NO: 2038 - protein, 16 aa, Rhodobacter capsulatus
GQTEIKESEIFVRLWV

SEQ ID NO: 2039 - protein, 15 aa, Rhodobacter capsulatus
LLRYLRGCRNQTFHL

SEQ ID NO: 2040 - protein, 16 aa, Rhodobacter capsulatus
LIDYAGAYERDTGTFL

SEQ ID NO: 2041 - protein, 14 aa, Rhodobacter capsulatus
TRKDLAHFNVLDRA

SEQ ID NO: 2042 - protein, 16 aa, Leptotrichia buccalis
FIARNRQNEAFLRNII

SEQ ID NO: 2043 - protein, 15 aa, Leptotrichia buccalis
IDEAISSIRHGIVHF

SEQ ID NO: 2044 - protein, 16 aa, Leptotrichia buccalis
LVGYTSIWERDLRFRL

SEQ ID NO: 2045 - protein, 14 aa, Leptotrichia buccalis
IRNYIAHFNYIPHA

SEQ ID NO: 2046 - protein, 16 aa, Leptotrichia sp.
FIVGNRQNEAFLRNII

SEQ ID NO: 2047 - protein, 15 aa, Leptotrichia sp.
IDEAISSIRHGIVHF

SEQ ID NO: 2048 - protein, 16 aa, Leptotrichia sp.
LVGYTSIWERDLRFRL

SEQ ID NO: 2049 - protein, 14 aa, Leptotrichia sp.
IRNYIAHFNYIPNA

SEQ ID NO: 2050 - protein, 16 aa, Leptotrichia sp.
DFSRLHAKEELDLELI

SEQ ID NO: 2051 - protein, 15 aa, Leptotrichia sp.
FQKEGYLLRNKILHN

SEQ ID NO: 2052 - protein, 16 aa, Leptotrichia sp.
LAIQMARFERDMHYIV

SEQ ID NO: 2053 - protein, 14 aa, Leptotrichia sp.
IRNYISHFYIVRNP

SEQ ID NO: 2054 - protein, 16 aa, Leptotrichia shahii
DFSRLHAKEELDLELI

SEQ ID NO: 2055 - protein, 15 aa, Leptotrichia shahii
FTKIGTNERNRILHA

SEQ ID NO: 2056 - protein, 16 aa, Leptotrichia shahii
LAIQMARFERDMHYIV

SEQ ID NO: 2057 - protein, 14 aa, Leptotrichia shahii
IRNYISHFYIVRNP

SEQ ID NO: 2058 - RNA, 56 nt, Artificial Sequence; identical to SEQ ID NO: 1958
  source: /note="Description of Artificial Sequence: Synthetic oligonucleotide"

SEQ ID NO: 2059 - RNA, 56 nt, Artificial Sequence; identical to SEQ ID NO: 1958
  source: /note="Description of Artificial Sequence: Synthetic oligonucleotide"

SEQ ID NO: 2060 - RNA, 56 nt, Artificial Sequence; identical to SEQ ID NO: 72
  source: /note="Description of Artificial Sequence: Synthetic oligonucleotide"

SEQ ID NO: 2061 - RNA, 56 nt, Artificial Sequence; identical to SEQ ID NO: 72
  source: /note="Description of Artificial Sequence: Synthetic oligonucleotide"

SEQ ID NO: 2062 - RNA, 173 nt, Artificial Sequence; identical to SEQ ID NO: 142
  source: /note="Description of Artificial Sequence: Synthetic polynucleotide"

SEQ ID NO: 2063 - RNA, 28 nt, Artificial Sequence
  source: /note="Description of Artificial Sequence: Synthetic oligonucleotide"
uagauugcuguucuaccaaguaauccau

SEQ ID NO: 2064 - RNA, 176 nt, Artificial Sequence; identical to SEQ ID NO: 145
  source: /note="Description of Artificial Sequence: Synthetic polynucleotide"

SEQ ID NO: 2065 - RNA, 28 nt, Artificial Sequence
  source: /note="Description of Artificial Sequence: Synthetic oligonucleotide"
uagauugcuguucuaccaaguaauccau

SEQ ID NO: 2066 - RNA, 176 nt, Artificial Sequence; identical to SEQ ID NO: 146
  source: /note="Description of Artificial Sequence: Synthetic polynucleotide"

SEQ ID NO: 2067 - RNA, 28 nt, Artificial Sequence
  source: /note="Description of Artificial Sequence: Synthetic oligonucleotide"
uagauugcuguucuaccaaguaauccau

SEQ ID NO: 2068 - RNA, 173 nt, Artificial Sequence; identical to SEQ ID NO: 142
  source: /note="Description of Artificial Sequence: Synthetic polynucleotide"

SEQ ID NO: 2069 - RNA, 28 nt, Artificial Sequence
  source: /note="Description of Artificial Sequence: Synthetic oligonucleotide"
uagauugcuguucuaccaaguaauccau

SEQ ID NO: 2070 - RNA, 176 nt, Artificial Sequence; identical to SEQ ID NO: 146
  source: /note="Description of Artificial Sequence: Synthetic polynucleotide"

SEQ ID NO: 2071 - RNA, 28 nt, Artificial Sequence
  source: /note="Description of Artificial Sequence: Synthetic oligonucleotide"
uagauugcuguucuaccaaguaauccau

SEQ ID NO: 2072 - DNA, 40 bp, Artificial Sequence
  source: /note="Description of Artificial Sequence: Synthetic oligonucleotide"
gtcaggtcggtactaacatcaagttagatggccgtctgtc

SEQ ID NO: 2073 - DNA, 28 bp, Artificial Sequence
  source: /note="Description of Artificial Sequence: Synthetic oligonucleotide"
gacagacggccatctaacttgatgttag

SEQ ID NO: 2074 - DNA, 28 bp, Artificial Sequence
  source: /note="Description of Artificial Sequence: Synthetic oligonucleotide"
gacggccatctaacttgatgttagtacc

SEQ ID NO: 2075 - DNA, 28 bp, Artificial Sequence
  source: /note="Description of Artificial Sequence: Synthetic oligonucleotide"
gccatctaacttgatgttagtaccgacc

SEQ ID NO: 2076 - DNA, 28 bp, Artificial Sequence
  source: /note="Description of Artificial Sequence: Synthetic oligonucleotide"
tctaacttgatgttagtaccgacctgac

SEQ ID NO: 2077 - RNA, 29 nt, Artificial Sequence
  source: /note="Description of Artificial Sequence: Synthetic oligonucleotide"
ccgucugucguauccagcugcaaacuucc

SEQ ID NO: 2078 - RNA, 29 nt, Artificial Sequence
  source: /note="Description of Artificial Sequence: Synthetic oligonucleotide"
gucguauccagcugcaaacuuccagacaa

SEQ ID NO: 2079 - RNA, 29 nt, Artificial Sequence
  source: /note="Description of Artificial Sequence: Synthetic oligonucleotide"
guuagauggccgucugucguauccagcug

SEQ ID NO: 2080 - RNA, 29 nt, Artificial Sequence
  source: /note="Description of Artificial Sequence: Synthetic oligonucleotide"
cagacaacgugcaacauaucgcgacguau

SEQ ID NO: 2081 - RNA, 70 nt, Artificial Sequence; identical to SEQ ID NO: 1905
  source: /note="Description of Artificial Sequence: Synthetic oligonucleotide"

SEQ ID NO: 2082 - RNA, 56 nt, Artificial Sequence; identical to SEQ ID NO: 72
  source: /note="Description of Artificial Sequence: Synthetic oligonucleotide"

SEQ ID NO: 2083 - RNA, 125 nt, Artificial Sequence
  source: /note="Description of Artificial Sequence: Synthetic polynucleotide"
gagcucgguacccggggauccucuagaaauauggauuacuugguagaacagcaaucuacucgaccugcaggcaugcaagcuuggcguaaucauggucauagcuguuuccuguguuuauccgcuca

SEQ ID NO: 2084 - RNA, 173 nt, Artificial Sequence; identical to SEQ ID NO: 142
  source: /note="Description of Artificial Sequence: Synthetic polynucleotide"

SEQ ID NO: 2085 - RNA, 28 nt, Artificial Sequence
  source: /note="Description of Artificial Sequence: Synthetic oligonucleotide"
uagauugcuguucuaccaaguaauccau

SEQ ID NO: 2086 - RNA, 176 nt, Artificial Sequence; identical to SEQ ID NO: 145
  source: /note="Description of Artificial Sequence: Synthetic polynucleotide"

SEQ ID NO: 2087 - RNA, 28 nt, Artificial Sequence
  source: /note="Description of Artificial Sequence: Synthetic oligonucleotide"
uagauugcuguucuaccaaguaauccau

SEQ ID NO: 2088 - RNA, 176 nt, Artificial Sequence; identical to SEQ ID NO: 146
  source: /note="Description of Artificial Sequence: Synthetic polynucleotide"

SEQ ID NO: 2089 - RNA, 28 nt, Artificial Sequence
  source: /note="Description of Artificial Sequence: Synthetic oligonucleotide"
uagauugcuguucuaccaaguaauccau

SEQ ID NO: 2090 - RNA, 55 nt, Artificial Sequence; identical to SEQ ID NO: 1957
  source: /note="Description of Artificial Sequence: Synthetic oligonucleotide"

SEQ ID NO: 2091 - RNA, 56 nt, Artificial Sequence; identical to SEQ ID NO: 1958
  source: /note="Description of Artificial Sequence: Synthetic oligonucleotide"

SEQ ID NO: 2092 - RNA, 56 nt, Artificial Sequence; identical to SEQ ID NO: 72
  source: /note="Description of Artificial Sequence: Synthetic oligonucleotide"

SEQ ID NO: 2093 - RNA, 24 nt, Artificial Sequence
  source: /note="Description of Artificial Sequence: Synthetic oligonucleotide"
uagauugcuguucuaccaaguaau

SEQ ID NO: 2094 - RNA, 23 nt, Artificial Sequence
  source: /note="Description of Artificial Sequence: Synthetic oligonucleotide"
uagauugcuguucuaccaaguaa

SEQ ID NO: 2095 - RNA, 12 nt, Artificial Sequence
  source: /note="Description of Artificial Sequence: Synthetic oligonucleotide"
uagauugcuguu

SEQ ID NO: 2096 - RNA, 56 nt, Artificial Sequence; identical to SEQ ID NO: 72
  source: /note="Description of Artificial Sequence: Synthetic oligonucleotide"

SEQ ID NO: 2097 - RNA, 28 nt, Artificial Sequence
  source: /note="Description of Artificial Sequence: Synthetic oligonucleotide"
ccacccgaauaucgaacgggacuaaaac

SEQ ID NO: 2098 - RNA, 28 nt, Artificial Sequence
  source: /note="Description of Artificial Sequence: Synthetic oligonucleotide"
ccaccgcaauaucgaagcggacuaaaac

SEQ ID NO: 2099 - RNA, 28 nt, Artificial Sequence
  source: /note="Description of Artificial Sequence: Synthetic oligonucleotide"
ccacgccaauaucgaaggcgacuaaaac

SEQ ID NO: 2100 - RNA, 28 nt, Artificial Sequence
  source: /note="Description of Artificial Sequence: Synthetic oligonucleotide"
ccagcccaauaucgaagggcacuaaaac

SEQ ID NO: 2101 - RNA, 28 nt, Artificial Sequence
  source: /note="Description of Artificial Sequence: Synthetic oligonucleotide"
ccaggggaauaucgaaccccacuaaaac

SEQ ID NO: 2102 - RNA, 29 nt, Artificial Sequence
  source: /note="Description of Artificial Sequence: Synthetic oligonucleotide"
ccaccaccaauaucgaaggggacuaaaac

SEQ ID NO: 2103 - RNA, 28 nt, Artificial Sequence
  source: /note="Description of Artificial Sequence: Synthetic oligonucleotide"
ccaacccaauaucgaaggggacuaaaac

SEQ ID NO: 2104 - RNA, 28 nt, Artificial Sequence
  source: /note="Description of Artificial Sequence: Synthetic oligonucleotide"
ccacccaaauaucgaaggggacuaaaac

SEQ ID NO: 2105 - RNA, 30 nt, Artificial Sequence; identical to SEQ ID NO: 1926
  source: /note="Description of Artificial Sequence: Synthetic oligonucleotide"

SEQ ID NO: 2106 - RNA, 28 nt, Artificial Sequence
  source: /note="Description of Artificial Sequence: Synthetic oligonucleotide"
ccaccccaauaucgaaggggacuaaaac

SEQ ID NO: 2107 - RNA, 27 nt, Artificial Sequence
  source: /note="Description of Artificial Sequence: Synthetic oligonucleotide"
ccaccccauaucgaaggggacuaaaac

SEQ ID NO: 2108 - RNA, 25 nt, Artificial Sequence
  source: /note="Description of Artificial Sequence: Synthetic oligonucleotide"
ccaccccaucgaaggggacuaaaac

SEQ ID NO: 2109 - RNA, 21 nt, Artificial Sequence
  source: /note="Description of Artificial Sequence: Synthetic oligonucleotide"
ccaccccaaggggacuaaaac

SEQ ID NO: 2110 - RNA, 29 nt, Artificial Sequence
  source: /note="Description of Artificial Sequence: Synthetic oligonucleotide"
ccaccccaaauaucgaaggggacuaaaac

SEQ ID NO: 2111 - RNA, 31 nt, Artificial Sequence; identical to SEQ ID NO: 1942
  source: /note="Description of Artificial Sequence: Synthetic oligonucleotide"

SEQ ID NO: 2112 - RNA, 35 nt, Artificial Sequence; identical to SEQ ID NO: 1953
  source: /note="Description of Artificial Sequence: Synthetic oligonucleotide"

SEQ ID NO: 2113 - RNA, 28 nt, Artificial Sequence
  source: /note="Description of Artificial Sequence: Synthetic oligonucleotide"
ccaccccgauaucgaaggggacuaaaac

SEQ ID NO: 2114 - RNA, 28 nt, Artificial Sequence
  source: /note="Description of Artificial Sequence: Synthetic oligonucleotide"
ccaccccaaaaucgaaggggacuaaaac

SEQ ID NO: 2115 - RNA, 28 nt, Artificial Sequence
  source: /note="Description of Artificial Sequence: Synthetic oligonucleotide"
ccaccccaauauccaaggggacuaaaac

SEQ ID NO: 2116 - RNA, 56 nt, Artificial Sequence; identical to SEQ ID NO: 1958
  source: /note="Description of Artificial Sequence: Synthetic oligonucleotide"

SEQ ID NO: 2117 - RNA, 28 nt, Artificial Sequence
  source: /note="Description of Artificial Sequence: Synthetic oligonucleotide"
uaguuugcagcuggauacgacagacggc

SEQ ID NO: 2118 - RNA, 28 nt, Artificial Sequence
  source: /note="Description of Artificial Sequence: Synthetic oligonucleotide"
aaguaugcagcuggauacgacagacggc

SEQ ID NO: 2119 - RNA, 28 nt, Artificial Sequence
  source: /note="Description of Artificial Sequence: Synthetic oligonucleotide"
aaguuugcugcuggauacgacagacggc

SEQ ID NO: 2120 - RNA, 28 nt, Artificial Sequence
  source: /note="Description of Artificial Sequence: Synthetic oligonucleotide"
aaguuugcagcucgauacgacagacggc

SEQ ID NO: 2121 - RNA, 28 nt, Artificial Sequence
  source: /note="Description of Artificial Sequence: Synthetic oligonucleotide"
aaguuugcagcuggauucgacagacggc

SEQ ID NO: 2122 - RNA, 28 nt, Artificial Sequence
  source: /note="Description of Artificial Sequence: Synthetic oligonucleotide"
aaguuugcagcuggauacgagagacggc

SEQ ID NO: 2123 - RNA, 28 nt, Artificial Sequence
  source: /note="Description of Artificial Sequence: Synthetic oligonucleotide"
aaguuugcagcuggauacgacagagggc

SEQ ID NO: 2124 - RNA, 56 nt, Artificial Sequence; identical to SEQ ID NO: 1958
  source: /note="Description of Artificial Sequence: Synthetic oligonucleotide"

SEQ ID NO: 2125 - RNA, 28 nt, Artificial Sequence
  source: /note="Description of Artificial Sequence: Synthetic oligonucleotide"
uuguuugcagcuggauacgacagacggc

SEQ ID NO: 2126 - RNA, 28 nt, Artificial Sequence
  source: /note="Description of Artificial Sequence: Synthetic oligonucleotide"
aaguuaccagcuggauacgacagacggc

SEQ ID NO: 2127 - RNA, 28 nt, Artificial Sequence
  source: /note="Description of Artificial Sequence: Synthetic oligonucleotide"
aaguuugcaggaggauacgacagacggc

SEQ ID NO: 2128 - RNA, 28 nt, Artificial Sequence
  source: /note="Description of Artificial Sequence: Synthetic oligonucleotide"
aaguuugcagcuggaaucgacagacggc

SEQ ID NO: 2129 - RNA, 28 nt, Artificial Sequence
  source: /note="Description of Artificial Sequence: Synthetic oligonucleotide"
aaguuugcagcuggauacgagcgacggc

SEQ ID NO: 2130 - RNA, 56 nt, Artificial Sequence; identical to SEQ ID NO: 72
  source: /note="Description of Artificial Sequence: Synthetic oligonucleotide"

SEQ ID NO: 2131 - RNA, 28 nt, Artificial Sequence
  source: /note="Description of Artificial Sequence: Synthetic oligonucleotide"
aagauugcuguucuaccaaguaauccau

SEQ ID NO: 2132 - RNA, 28 nt, Artificial Sequence
  source: /note="Description of Artificial Sequence: Synthetic oligonucleotide"
uagaaugcuguucuaccaaguaauccau

SEQ ID NO: 2133 - RNA, 28 nt, Artificial Sequence
  source: /note="Description of Artificial Sequence: Synthetic oligonucleotide"
uagauugcaguucuaccaaguaauccau

SEQ ID NO: 2134 - RNA, 28 nt, Artificial Sequence
  source: /note="Description of Artificial Sequence: Synthetic oligonucleotide"
uagauugcuguuguaccaaguaauccau

SEQ ID NO: 2135 - RNA, 28 nt, Artificial Sequence
  source: /note="Description of Artificial Sequence: Synthetic oligonucleotide"
uagauugcuguucuacgaaguaauccau

SEQ ID NO: 2136 - RNA, 28 nt, Artificial Sequence
  source: /note="Description of Artificial Sequence: Synthetic oligonucleotide"
uagauugcuguucuaccaagaaauccau

SEQ ID NO: 2137 - RNA, 28 nt, Artificial Sequence
  source: /note="Description of Artificial Sequence: Synthetic oligonucleotide"
uagauugcuguucuaccaaguaaugcau

SEQ ID NO: 2138 - RNA, 28 nt, Artificial Sequence
  source: /note="Description of Artificial Sequence: Synthetic oligonucleotide"
uagauugcuguucuaccaaguaauccaa

SEQ ID NO: 2139 - RNA, 56 nt, Artificial Sequence; identical to SEQ ID NO: 72
  source: /note="Description of Artificial Sequence: Synthetic oligonucleotide"

SEQ ID NO: 2140 - RNA, 28 nt, Artificial Sequence
  source: /note="Description of Artificial Sequence: Synthetic oligonucleotide"
augauugcuguucuaccaaguaauccau

SEQ ID NO: 2141 - RNA, 28 nt, Artificial Sequence
  source: /note="Description of Artificial Sequence: Synthetic oligonucleotide"
uagauaccuguucuaccaaguaauccau

SEQ ID NO: 2142 - RNA, 28 nt, Artificial Sequence
  source: /note="Description of Artificial Sequence: Synthetic oligonucleotide"
uagauugcugaacuaccaaguaauccau

SEQ ID NO: 2143 - RNA, 28 nt, Artificial Sequence
  source: /note="Description of Artificial Sequence: Synthetic oligonucleotide"
uagauugcuguuguaggaaguaauccau

SEQ ID NO: 2144 - RNA, 28 nt, Artificial Sequence
  source: /note="Description of Artificial Sequence: Synthetic oligonucleotide"
uagauugcuguucuaccaagauauccau

SEQ ID NO: 2145 - RNA, 28 nt, Artificial Sequence
  source: /note="Description of Artificial Sequence: Synthetic oligonucleotide"
uagauugcuguucuaccaaguaaucguu

SEQ ID NO: 2146 - RNA, 60 nt, Artificial Sequence
  source: /note="Description of Artificial Sequence: Synthetic oligonucleotide"
uucgaaaucgaaggugaaggugaaggucguccguacgaagguacccagaccgcuaaacug

SEQ ID NO: 2147 - RNA, 60 nt, Artificial Sequence
  source: /note="Description of Artificial Sequence: Synthetic oligonucleotide"
aaacugucccuuccggaagguuucaaaugggaacguguuaugaacuucgaagacgguggu

SEQ ID NO: 2148 - RNA, 60 nt, Artificial Sequence
  source: /note="Description of Artificial Sequence: Synthetic oligonucleotide"
ccaggacuccucccugcaagacggugaguucaucuacaaaguuaaacugcgugguaccaa

SEQ ID NO: 2149 - RNA, 28 nt, Artificial Sequence
  source: /note="Description of Artificial Sequence: Synthetic oligonucleotide"
ccaccccaauaucgaaggggacuaaaac

SEQ ID NO: 2150 - RNA, 56 nt, Artificial Sequence; identical to SEQ ID NO: 1898
  source: /note="Description of Artificial Sequence: Synthetic oligonucleotide"
  modified_base (29)..(56): a, c, u, g, unknown or other
  variation (43)..(56): /replace=" "
  misc_feature (1)..(56): /note="Variant nucleotides given in the sequence have no preference with respect to those in the annotations for variant positions"

SEQ ID NO: 2151 - RNA, 29 nt, Artificial Sequence
  source: /note="Description of Artificial Sequence: Synthetic oligonucleotide"
cgccuuacaagaaguucgcugaacaagca

SEQ ID NO: 2152 - RNA, 29 nt, Artificial Sequence
  source: /note="Description of Artificial Sequence: Synthetic oligonucleotide"
uucgcuacgaauuccgacugcgagcuuau

SEQ ID NO: 2153 - RNA, 29 nt, Artificial Sequence
  source: /note="Description of Artificial Sequence: Synthetic oligonucleotide"
acgggugaguccaucauaagcguugacgc

SEQ ID NO: 2154 - RNA, 29 nt, Artificial Sequence
  source: /note="Description of Artificial Sequence: Synthetic oligonucleotide"
aaccguuuuacaucaagaaaccuguugac

SEQ ID NO: 2155 - RNA, 29 nt, Artificial Sequence
  source: /note="Description of Artificial Sequence: Synthetic oligonucleotide"
gccgucugucguauccagcugcaaacuuc

SEQ ID NO: 2156 - RNA, 29 nt, Artificial Sequence
  source: /note="Description of Artificial Sequence: Synthetic oligonucleotide"
ccgucugucguauccagcugcaaacuucc

SEQ ID NO: 2157 - RNA, 29 nt, Artificial Sequence
  source: /note="Description of Artificial Sequence: Synthetic oligonucleotide"
auggccgucugucguauccagcugcaaac

SEQ ID NO: 2158 - RNA, 29 nt, Artificial Sequence
  source: /note="Description of Artificial Sequence: Synthetic oligonucleotide"
uuagauggccgucugucguauccagcugc

SEQ ID NO: 2159 - RNA, 29 nt, Artificial Sequence
  source: /note="Description of Artificial Sequence: Synthetic oligonucleotide"
guuagauggccgucugucguauccagcug

SEQ ID NO: 2160 - RNA, 29 nt, Artificial Sequence
  source: /note="Description of Artificial Sequence: Synthetic oligonucleotide"
cguauccagcugcaaacuuccagacaacg

SEQ ID NO: 2161 - RNA, 29 nt, Artificial Sequence
  source: /note="Description of Artificial Sequence: Synthetic oligonucleotide"
aacuuccagacaacgugcaacauaucgcg

SEQ ID NO: 2162 - RNA, 29 nt, Artificial Sequence
  source: /note="Description of Artificial Sequence: Synthetic oligonucleotide"
uauccagcugcaaacuuccagacaacgug

SEQ ID NO: 2163 - RNA, 29 nt, Artificial Sequence
  source: /note="Description of Artificial Sequence: Synthetic oligonucleotide"
gucguauccagcugcaaacuuccagacaa

SEQ ID NO: 2164 - RNA, 29 nt, Artificial Sequence
  source: /note="Description of Artificial Sequence: Synthetic oligonucleotide"
cugcaaacuuccagacaacgugcaacaua

SEQ ID NO: 2165 - RNA, 29 nt, Artificial Sequence
  source: /note="Description of Artificial Sequence: Synthetic oligonucleotide"
agauggccgucugucguauccagcugcaa

SEQ ID NO: 2166 - RNA, 29 nt, Artificial Sequence
  source: /note="Description of Artificial Sequence: Synthetic oligonucleotide"
ucugucguauccagcugcaaacuuccaga

SEQ ID NO: 2167 - RNA, 29 nt, Artificial Sequence
  source: /note="Description of Artificial Sequence: Synthetic oligonucleotide"
ggccgucugucguauccagcugcaaacuu

SEQ ID NO: 2168 - RNA, 29 nt, Artificial Sequence
  source: /note="Description of Artificial Sequence: Synthetic oligonucleotide"
cagacaacgugcaacauaucgcgacguau

SEQ ID NO: 2169 - RNA, 29 nt, Artificial Sequence
  source: /note="Description of Artificial Sequence: Synthetic oligonucleotide"
aguuagauggccgucugucguauccagcu

SEQ ID NO: 2170 - RNA, 29 nt, Artificial Sequence
  source: /note="Description of Artificial Sequence: Synthetic oligonucleotide"
uggccgucugucguauccagcugcaaacu

SEQ ID NO: 2171 - RNA, 29 nt, Artificial Sequence
  source: /note="Description of Artificial Sequence: Synthetic oligonucleotide"
ccgucugucguauccagcugcaaacuucc

SEQ ID NO: 2172 - RNA, 29 nt, Artificial Sequence
  source: /note="Description of Artificial Sequence: Synthetic oligonucleotide"
gccgucugucguauccagcugcaaacuuc

SEQ ID NO: 2173 - RNA, 28 nt, Artificial Sequence
  source: /note="Description of Artificial Sequence: Synthetic oligonucleotide"
uaguuugcagcuggauacgacagacggc

SEQ ID NO: 2174 - RNA, 28 nt, Artificial Sequence
  source: /note="Description of Artificial Sequence: Synthetic oligonucleotide"
aaguaugcagcuggauacgacagacggc

SEQ ID NO: 2175 - RNA, 28 nt, Artificial Sequence
  source: /note="Description of Artificial Sequence: Synthetic oligonucleotide"
aaguuugcugcuggauacgacagacggc

SEQ ID NO: 2176 - RNA, 28 nt, Artificial Sequence
  source: /note="Description of Artificial Sequence: Synthetic oligonucleotide"
aaguuugcagcucgauacgacagacggc

SEQ ID NO: 2177 - RNA, 28 nt, Artificial Sequence
  source: /note="Description of Artificial Sequence: Synthetic oligonucleotide"
aaguuugcagcuggauucgacagacggc

SEQ ID NO: 2178 - RNA, 28 nt, Artificial Sequence
  source: /note="Description of Artificial Sequence: Synthetic oligonucleotide"
aaguuugcagcuggauacgagagacggc

SEQ ID NO: 2179 - RNA, 29 nt, Artificial Sequence
  source: /note="Description of Artificial Sequence: Synthetic oligonucleotide"
aaaguuugcagcuggauacgacagagggc

SEQ ID NO: 2180 - RNA, 28 nt, Artificial Sequence
  source: /note="Description of Artificial Sequence: Synthetic oligonucleotide"
uuguuugcagcuggauacgacagacggc

SEQ ID NO: 2181 - RNA, 28 nt, Artificial Sequence
  source: /note="Description of Artificial Sequence: Synthetic oligonucleotide"
aaguuaccagcuggauacgacagacggc

SEQ ID NO: 2182 - RNA, 28 nt, Artificial Sequence
  source: /note="Description of Artificial Sequence: Synthetic oligonucleotide"
aaguuugcaggaggauacgacagacggc

SEQ ID NO: 2183 - RNA, 28 nt, Artificial Sequence
  source: /note="Description of Artificial Sequence: Synthetic oligonucleotide"
aaguuugcagcuggaaucgacagacggc

SEQ ID NO: 2184 - RNA, 28 nt, Artificial Sequence
  source: /note="Description of Artificial Sequence: Synthetic oligonucleotide"
aaguuugcagcuggauacgagcgacggc

SEQ ID NO: 2185 - RNA, 28 nt, Artificial Sequence
  source: /note="Description of Artificial Sequence: Synthetic oligonucleotide"
aaguuugcagcuggauacgacagacggc

SEQ ID NO: 2186 - RNA, 55 nt, Artificial Sequence
  source: /note="Description of Artificial Sequence: Synthetic oligonucleotide"
aucaaguuaggguccgcugccguucgcuugggacauccuguccagacaacgugca

SEQ ID NO: 2187 - RNA, 56 nt, Artificial Sequence
  source: /note="Description of Artificial Sequence: Synthetic oligonucleotide"
ccaccccaauaucgaaggggacuaaaacacaggaugucccaagcgaacggcagcgg

SEQ ID NO: 2188 - RNA, 56 nt, Artificial Sequence; identical to SEQ ID NO: 72
  source: /note="Description of Artificial Sequence: Synthetic oligonucleotide"

SEQ ID NO: 2189 - RNA, 28 nt, Artificial Sequence
  source: /note="Description of Artificial Sequence: Synthetic oligonucleotide"
aagaaugcuguucuaccaaguaauccau

SEQ ID NO: 2190 - RNA, 28 nt, Artificial Sequence
  source: /note="Description of Artificial Sequence: Synthetic oligonucleotide"
aagauugcaguucuaccaaguaauccau

SEQ ID NO: 2191 - RNA, 28 nt, Artificial Sequence
  source: /note="Description of Artificial Sequence: Synthetic oligonucleotide"
aagauugcuguuguaccaaguaauccau

SEQ ID NO: 2192 - RNA, 28 nt, Artificial Sequence
  source: /note="Description of Artificial Sequence: Synthetic oligonucleotide"
uagaaugcaguucuaccaaguaauccau

SEQ ID NO: 2193 - RNA, 28 nt, Artificial Sequence
  source: /note="Description of Artificial Sequence: Synthetic oligonucleotide"
uagaaugcuguuguaccaaguaauccau

SEQ ID NO: 2194 - RNA, 28 nt, Artificial Sequence
  source: /note="Description of Artificial Sequence: Synthetic oligonucleotide"
uagaaugcuguucuacgaaguaauccau

SEQ ID NO: 2195 - RNA, 28 nt, Artificial Sequence
  source: /note="Description of Artificial Sequence: Synthetic oligonucleotide"
uagauugcaguuguaccaaguaauccau

SEQ ID NO: 2196 - RNA, 28 nt, Artificial Sequence
  source: /note="Description of Artificial Sequence: Synthetic oligonucleotide"
uagauugcaguucuacgaaguaauccau

SEQ ID NO: 2197 - RNA, 28 nt, Artificial Sequence
  source: /note="Description of Artificial Sequence: Synthetic oligonucleotide"
uagauugcaguuguaccaagaaauccau

SEQ ID NO: 2198 - RNA, 28 nt, Artificial Sequence
  source: /note="Description of Artificial Sequence: Synthetic oligonucleotide"
uagauugcuguuguacgaaguaauccau

SEQ ID NO: 2199 - RNA, 28 nt, Artificial Sequence
  source: /note="Description of Artificial Sequence: Synthetic oligonucleotide"
uagauugcuguuguaccaagaaauccau

SEQ ID NO: 2200 - RNA, 28 nt, Artificial Sequence
  source: /note="Description of Artificial Sequence: Synthetic oligonucleotide"
uagauugcuguuguaccaaguaaugcau

SEQ ID NO: 2201 - RNA, 56 nt, Artificial Sequence; identical to SEQ ID NO: 72
  source: /note="Description of Artificial Sequence: Synthetic oligonucleotide"

SEQ ID NO: 2202 - RNA, 28 nt, Artificial Sequence
  source: /note="Description of Artificial Sequence: Synthetic oligonucleotide"
aucauugcuguucuaccaaguaauccau

SEQ ID NO: 2203 - RNA, 28 nt, Artificial Sequence
  source: /note="Description of Artificial Sequence: Synthetic oligonucleotide"
uagauacguguucuaccaaguaauccau

SEQ ID NO: 2204 - RNA, 28 nt, Artificial Sequence
  source: /note="Description of Artificial Sequence: Synthetic oligonucleotide"
uagauugcugaaguaccaaguaauccau

SEQ ID NO: 2205 - RNA, 28 nt, Artificial Sequence
  source: /note="Description of Artificial Sequence: Synthetic oligonucleotide"
uagauugcuguuguagguaguaauccau

SEQ ID NO: 2206 - RNA, 28 nt, Artificial Sequence
  source: /note="Description of Artificial Sequence: Synthetic oligonucleotide"
uagauugcuguucuaccaagauuuccau

SEQ ID NO: 2207 - RNA, 28 nt, Artificial Sequence
  source: /note="Description of Artificial Sequence: Synthetic oligonucleotide"
uagauugcuguucuaccaaguaaucgua

SEQ ID NO: 2208 - RNA, 28 nt, Artificial Sequence
  source: /note="Description of Artificial Sequence: Synthetic oligonucleotide"
ccaccccaauaucgaaggggucuaaaac

SEQ ID NO: 2209 - RNA, 28 nt, Artificial Sequence
  source: /note="Description of Artificial Sequence: Synthetic oligonucleotide"
ccaccccaauaucgaaggggaguaaaac

SEQ ID NO: 2210 - RNA, 27 nt, Artificial Sequence
  source: /note="Description of Artificial Sequence: Synthetic oligonucleotide"
ccaccccaauaucgaaggggcuaaaac

SEQ ID NO: 2211 - RNA, 27 nt, Artificial Sequence
  source: /note="Description of Artificial Sequence: Synthetic oligonucleotide"
ccaccccaauaucgaaggggauaaaac

SEQ ID NO: 2212 - RNA, 28 nt, Artificial Sequence
  source: /note="Description of Artificial Sequence: Synthetic oligonucleotide"
ccaccccaauaucgaaggggacaaaaac

SEQ ID NO: 2213 - RNA, 28 nt, Artificial Sequence
  source: /note="Description of Artificial Sequence: Synthetic oligonucleotide"
ccaccccaauaucgaaggggacuuaaac

SEQ ID NO: 2214 - RNA, 27 nt, Artificial Sequence
  source: /note="Description of Artificial Sequence: Synthetic oligonucleotide"
ccaccccaauaucgaaggggacaaaac

SEQ ID NO: 2215 - RNA, 27 nt, Artificial Sequence
  source: /note="Description of Artificial Sequence: Synthetic oligonucleotide"
ccaccccaauaucgaaggggacuaaac

SEQ ID NO: 2216 - RNA, 28 nt, Artificial Sequence
  source: /note="Description of Artificial Sequence: Synthetic oligonucleotide"
ccaccccaauaucgaaggggacuauaac

SEQ ID NO: 2217 - RNA, 28 nt, Artificial Sequence
  source: /note="Description of Artificial Sequence: Synthetic oligonucleotide"
ccaccccaauaucgaaggggacuaauac

SEQ ID NO: 2218 - RNA, 26 nt, Artificial Sequence
  source: /note="Description of Artificial Sequence: Synthetic oligonucleotide"
ccaccccaauaucgaaggggacuaac

SEQ ID NO: 2219 - RNA, 25 nt, Artificial Sequence
  source: /note="Description of Artificial Sequence: Synthetic oligonucleotide"
ccaccccaauaucgaaggggacuac

SEQ ID NO: 2220 - RNA, 28 nt, Artificial Sequence
  source: /note="Description of Artificial Sequence: Synthetic oligonucleotide"
ccaccccaauaucgaaggggacuaaauc

SEQ ID NO: 2221 - RNA, 28 nt, Artificial Sequence
  source: /note="Description of Artificial Sequence: Synthetic oligonucleotide"
ccaccccaauaucgaaggggacuaaaag

SEQ ID NO: 2222 - RNA, 24 nt, Artificial Sequence
  source: /note="Description of Artificial Sequence: Synthetic oligonucleotide"
ccaccccaauaucgaaggggacuc

SEQ ID NO: 2223 - RNA, 27 nt, Artificial Sequence
  source: /note="Description of Artificial Sequence: Synthetic oligonucleotide"
ccaccccaauaucgaaggggacuaaaa

SEQ ID NO: 2224 - RNA, 28 nt, Artificial Sequence
  source: /note="Description of Artificial Sequence: Synthetic oligonucleotide"
ccaccccaauaucgaaggggacuaaaac

SEQ ID NO: 2225 - RNA, 173 nt, Artificial Sequence; identical to SEQ ID NO: 142
  source: /note="Description of Artificial Sequence: Synthetic polynucleotide"

SEQ ID NO: 2226 - RNA, 28 nt, Artificial Sequence
  source: /note="Description of Artificial Sequence: Synthetic oligonucleotide"
uagauugcuguucuaccaaguaauccau

SEQ ID NO: 2227 - RNA, 176 nt, Artificial Sequence; identical to SEQ ID NO: 146
  source: /note="Description of Artificial Sequence: Synthetic polynucleotide"

SEQ ID NO: 2228 - RNA, 28 nt, Artificial Sequence
  source: /note="Description of Artificial Sequence: Synthetic oligonucleotide"
uagauugcuguucuaccaaguaauccau
